(19) United States
(12) Patent Application Publication
(10) Pub. No.: US 2009/0214542 A1
(43) Pub. Date: Aug. 27, 2009

(54) Novel therapeutic targets in cancer

(76) Inventors: David W. Morris, Davis, CA (US); Marc S. Malandro, Davis, CA (US)

Correspondence Address: NOVARTIS VACCINES AND DIAGNOSTICS, INC.;CORPORATE INTELLECTUAL PROPERTY-R338, P.O. BOX 8097, EMERYVILLE, CA, 94662-8097, US

(21) Appl. No.: 10/670,914

(22) Filed: Sep. 24, 2003

(51) Int. Cl. A61K 39/395; C12N 15/11; C12N 5/06; C12N 15/00; C12Q 1/68; C12Q 1/02; A61P 43/00; A61K 31/70; C40B 40/10; G01N 33/574; C40B 40/08; C07K 16/18

(52) U.S. Cl. 424/138.1; 536/23.1; 435/325; 435/320.1; 506/17; 530/350; 530/387.9; 530/391.1; 530/391.3; 435/331; 530/387.3; 530/387.7; 530/391.7; 424/178.1; 435/7.23; 435/6; 506/18; 435/29; 514/44

(57) ABSTRACT

The present invention relates to novel sequences for use in detection, diagnosis and treatment of cancers, especially lymphomas. The invention provides cancer-associated (CA) polynucleotide sequences whose expression is associated with cancer. The present invention provides CA polypeptides associated with cancer that are present on the cell surface and present novel therapeutic targets against cancer. The present invention further provides diagnostic compositions and methods for the detection of cancer. The present invention provides monoclonal and polyclonal antibodies specific for the CA polypeptides. The present invention also provides diagnostic tools and therapeutic compositions and methods for screening, prevention and treatment of cancer.

### CROSS-REFERENCE TO RELATED APPLICATIONS

[0001] This application is related to the following U.S. Applications: U.S. Ser. No. 10/034,650, filed Dec. 20, 2001; U.S. Ser. No. 10/035,832, filed Dec. 26, 2001; U.S. Ser. No. 10/004,113, filed Oct. 23, 2001; U.S. Ser. No. 09/997,722, filed Nov. 30, 2001; U.S. Ser. No. 10/085,117, filed Feb. 27, 2002; U.S. Ser. No. 10/087,192, filed Mar. 1, 2002; U.S. Ser. No. 10/322,281, filed Dec. 17, 2002; U.S. Ser. No. 10/322,696, filed Dec. 17, 2002, U.S. Ser. No. 10/331,053, filed Dec. 26, 2002; U.S. Ser. No. 10/330,773, filed Dec. 27, 2002; U.S. Ser. No. 10/367,094, filed Feb. 14, 2003; U.S. Ser. No. 10/388,838, filed Mar. 14, 2003, U.S. Ser. No. 10/417,375 filed Apr. 15, 2003, U.S. Ser. No. 10/461,862, filed Jun. 13, 2003, U.S. Ser. No. 10/663,431 filed Sep. 15, 2003, and U.S. Ser. No. Unknown (Attorney Docket 529452001900) filed Sep. 23, 2003, all of which are expressly incorporated herein by reference in their entirety.

### DESCRIPTION OF ACCOMPANYING CD-ROMS

[0002] Tables 1-21 are filed herewith in CD-ROM in accordance with 37 C.F.R. §§ 1.52 and 1.58. Two identical copies (marked “Copy 1” and “Copy 2”) of this CD-ROM are submitted.

[0003] Contents of the CD-ROM disks submitted herewith are hereby incorporated by reference into the Specification.

LENGTHY TABLES
The patent application contains a lengthy table section. A copy of the table is available in electronic form from the USPTO web site (http://seqdata.uspto.gov/?pageRequest=docDetail&DocID=US20090214542A1). An electronic copy of the table will also be available from the USPTO upon request and payment of the fee set forth in 37 CFR 1.19(b)(3).

### TECHNICAL FIELD OF THE INVENTION

[0004] This invention relates generally to the field of cancer-associated genes. Specifically, it relates to novel sequences for use in diagnosis and treatment of cancer and tumors, as well as the use of the novel compositions in screening methods. The present invention provides methods of using cancer associated polynucleotides, their corresponding gene products and antibodies specific for the gene products in the detection, diagnosis, prevention and/or treatment of associated cancers.

### BACKGROUND OF THE INVENTION

[0005] Oncogenes are genes that can cause cancer. Carcinogenesis can occur by a wide variety of mechanisms, including infection of cells by viruses containing oncogenes, activation of protooncogenes in the host genome, and mutations of protooncogenes and tumor suppressor genes. Carcinogenesis is fundamentally driven by somatic cell evolution (i.e. mutation and natural selection of variants with progressive loss of growth control). The genes that serve as targets for these somatic mutations are classified as either protooncogenes or tumor suppressor genes, depending on whether their mutant phenotypes are dominant or recessive, respectively.

[0006] There are a number of viruses known to be involved in human cancer as well as in animal cancer. Of particular interest here are viruses that do not contain oncogenes themselves; these are slow-transforming retroviruses. They induce tumors by integrating into the host genome and affecting neighboring protooncogenes in a variety of ways. Provirus insertion mutation is a normal consequence of the retroviral life cycle. In infected cells, a DNA copy of the retrovirus genome (called a provirus) is integrated into the host genome. A newly integrated provirus can affect gene expression in cis at or near the integration site by one of two mechanisms. Type I insertion mutations up-regulate transcription of proximal genes as a consequence of regulatory sequences (enhancers and/or promoters) within the proviral long terminal repeats (LTRs). Type II insertion mutations cause truncation of coding regions due to either integration directly within an open reading frame or integration within an intron flanked on both sides by coding sequences. The analysis of sequences at or near the insertion sites has led to the identification of a number of new protooncogenes.

[0007] With respect to lymphoma and leukemia, retroviruses such as AKV murine leukemia virus (MLV) or SL3-3 MLV, are potent inducers of tumors when inoculated into susceptible newborn mice, or when carried in the germline. A number of sequences have been identified as relevant in the induction of lymphoma and leukemia by analyzing the insertion sites; see Sorensen et al., J. of Virology 74:2161 (2000); Hansen et al., Genome Res. 10(2):237-43 (2000); Sorensen et al., J. Virology 70:4063 (1996); Sorensen et al., J. Virology 67:7118 (1993); Joosten et al., Virology 268:308 (2000); and Li et al., Nature Genetics 23:348 (1999); all of which are expressly incorporated by reference herein. With respect to cancers, especially breast cancer, prostate cancer and cancers with epithelial origin, the mammalian retrovirus, mouse mammary tumor virus (MMTV) is a potent inducer of tumors when inoculated into susceptible newborn mice, or when carried in the germ line. Mammary Tumors in the Mouse, edited by J. Hilgers and M. Sluyser; Elsevier/North-Holland Biomedical Press; New York, N.Y.

[0008] The pattern of gene expression in a particular living cell is characteristic of its current state. Nearly all differences in the state or type of a cell are reflected in the differences in RNA levels of one or more genes. Comparing expression patterns of uncharacterized genes may provide clues to their function. High throughput analysis of expression of hundreds or thousands of genes can help in (a) identification of complex genetic diseases, (b) analysis of differential gene expression over time, between tissues and disease states, and (c) drug discovery and toxicology studies. Increase or decrease in the levels of expression of certain genes correlate with cancer biology. For example, oncogenes are positive regulators of tumorigenesis, while tumor suppressor genes are negative regulators of tumorigenesis. (Marshall, Cell, 64: 313-326 (1991); Weinberg, Science, 254: 1138-1146 (1991)).

[0009] Accordingly, it is an object of the invention to provide polynucleotide and polypeptide sequences involved in cancer and, in particular, in oncogenesis.

[0010] Immunotherapy, or the use of antibodies for therapeutic purposes has been used in recent years to treat cancer. Passive immunotherapy involves the use of monoclonal antibodies in cancer treatments. See for example, Cancer: Principles and Practice of Oncology, 6^{th} Edition (2001) Chapt. 20 pp. 495-508. Inherent therapeutic biological activity of these antibodies include direct inhibition of tumor cell growth or survival, and the ability to recruit the natural cell killing activity of the body's immune system. These agents are administered alone or in conjunction with radiation or chemotherapeutic agents. Rituxan® and Herceptin®, approved for treatment of lymphoma and breast cancer, respectively, are two examples of such therapeutics. Alternatively, antibodies are used to make antibody conjugates where the antibody is linked to a toxic agent and directs that agent to the tumor by specifically binding to the tumor. Mylotarg® is an example of an approved antibody conjugate used for the treatment of leukemia.

[0011] Accordingly, it is another object of this invention to provide antigens (cancer-associated polypeptides) associated with a variety of cancers as targets for diagnostic and/or therapeutic antibodies. These antigens are also useful for drug discovery (e.g., small molecules) and for further characterization of cellular regulation, growth, and differentiation.

### SUMMARY OF THE INVENTION

[0012] In accordance with the objects outlined above, the present invention provides methods for screening for compositions that modulate cancer, especially lymphoma and leukemia. The present invention also provides methods for screening for compositions which modulate carcinomas, especially mammary adenocarcinomas. Also provided herein are methods of inhibiting proliferation of a cell, preferably a lymphoma cell or a breast cancer cell. Methods of treatment of cancer, including diagnosis, are also provided herein.

[0013] In one aspect, a method of screening drug candidates comprises providing a cell that expresses a cancer-associated (CA) gene or fragments thereof. Preferred embodiments of CA genes are genes that are differentially expressed in cancer cells, preferably lymphatic, breast, prostate or epithelial cells, compared to other cells. Preferred embodiments of CA genes used in the methods herein include, but are not limited to the nucleic acids selected from Tables 1-21 (human genomic sequences of SEQ ID NOS: 4, 17, 32, 42, 50, 58, 74, 77, 87, 99, 112, 122, 145, 163, 169, 177, and 185, and sequences of SEQ ID NOS: 5, 7, 9, 18, 20, 22, 24, 33, 35, 37, 43, 45, 51, 53, 59, 75, 78, 80, 82, 88, 90, 92, 94, 100, 102, 113, 115, 123, 146, 148, 150, 152, 154, 156, 158, 164, 170, 172, 178, 180, 186, 188, and 190 corresponding to the human mRNAs generated therefrom). The methods further include adding a drug candidate to the cell and determining the effect of the drug candidate on the expression of the CA gene.

[0014] In one embodiment, the method of screening drug candidates includes comparing the level of expression in the absence of the drug candidate to the level of expression in the presence of the drug candidate.

[0015] Also provided herein is a method of screening for a bioactive agent capable of binding to a CA protein (CAP), the method comprising combining the CAP and a candidate bioactive agent, and determining the binding of the candidate agent to the CAP.

[0016] Further provided herein is a method for screening for a bioactive agent capable of modulating the activity of a CAP. In one embodiment, the method comprises combining the CAP and a candidate bioactive agent, and determining the effect of the candidate agent on the bioactivity of the CAP.

[0017] Also provided is a method of evaluating the effect of a candidate cancer drug comprising administering the drug to a patient and removing a cell sample from the patient. The expression profile of the cell is then determined. This method may further comprise comparing the expression profile of the patient to an expression profile of a healthy individual.

[0018] In a further aspect, a method for inhibiting the activity of a CA protein is provided. In one embodiment, the method comprises administering to a patient an inhibitor of a CA protein preferably selected from the group consisting of the sequences outlined in Tables 1-21 (SEQ ID NOS: 6, 8, 10, 19, 21, 23, 25, 34, 36, 38, 44, 46, 52, 54, 60, 76, 79, 81, 83, 89, 91, 93, 95, 101, 103, 114, 116, 124, 147, 149, 151, 153, 155, 157, 159, 165, 171, 173, 179, 181, 187, 189, and 191).

[0019] A method of neutralizing the effect of a CA protein, preferably a protein encoded by a nucleic acid selected from the group of sequences outlined in Tables 1-21 (human genomic sequences of SEQ ID NOS: 4, 17, 32, 42, 50, 58, 74, 77, 87, 99, 112, 122, 145, 163, 169, 177, and 185, and sequences of SEQ ID NOS: 5, 7, 9, 18, 20, 22, 24, 33, 35, 37, 43, 45, 51, 53, 59, 75, 78, 80, 82, 88, 90, 92, 94, 100, 102, 113, 115, 123, 146, 148, 150, 152, 154, 156, 158, 164, 170, 172, 178, 180, 186, 188, and 190 corresponding to the human mRNAs generated therefrom), is also provided. Preferably, the method comprises contacting an agent specific for said protein with said protein in an amount sufficient to effect neutralization.

[0020] Moreover, provided herein is a biochip comprising a nucleic acid segment which encodes a CA protein, preferably selected from the sequences outlined in Tables 1-21 (SEQ ID NOS: 5, 7, 9, 18, 20, 22, 24, 33, 35, 37, 43, 45, 51, 53, 59, 75, 78, 80, 82, 88, 90, 92, 94, 100, 102, 113, 115, 123, 146, 148, 150, 152, 154, 156, 158, 164, 170, 172, 178, 180, 186, 188, and 190).

[0021] Also provided herein is a method for diagnosing or determining the propensity to cancers, especially lymphoma or leukemia or carcinoma by sequencing at least one carcinoma or lymphoma gene of an individual. In yet another aspect of the invention, a method is provided for determining cancer including lymphoma and leukemia gene copy numbers in an individual.

[0022] The invention provides an isolated nucleic acid comprising at least 10, 12, 15, or 30 contiguous nucleotides of a sequence selected from the group consisting of the polynucleotide sequences SEQ ID NOS: 5, 7, 9, 18, 20, 22, 24, 33, 35, 37, 43, 45, 51, 53, 59, 75, 78, 80, 82, 88, 90, 92, 94, 100, 102, 113, 115, 123, 146, 148, 150, 152, 154, 156, 158, 164, 170, 172, 178, 180, 186, 188, and 190 shown in Tables 1-21, or its complement, or an expression vector comprising the isolated nucleic acids and host cells comprising them.

[0023] In some embodiments, the polynucleotide, or its complement or a fragment thereof, further comprises a detectable label, is attached to a solid support, is prepared at least in part by chemical synthesis, is an antisense fragment, is single stranded, is double stranded or comprises a microarray.

[0024] The invention provides an isolated polypeptide, encoded within an open reading frame of a CA sequence selected from the group consisting of the polynucleotide sequences of SEQ ID NOS: 4, 17, 32, 42, 50, 58, 74, 77, 87, 99, 112, 122, 145, 163, 169, 177, and 185 shown in Tables 1-21, or its complement. The invention provides an isolated polypeptide, wherein said polypeptide comprises the amino acid sequence encoded by a polynucleotide selected from the group consisting of SEQ ID NOS: 5, 7, 9, 18, 20, 22, 24, 33, 35, 37, 43, 45, 51, 53, 59, 75, 78, 80, 82, 88, 90, 92, 94, 100, 102, 113, 115, 123, 146, 148, 150, 152, 154, 156, 158, 164, 170, 172, 178, 180, 186, 188, and 190 shown in Tables 1-21. The invention provides an isolated polypeptide, wherein said polypeptide comprises the amino acid sequence encoded by a polypeptide selected from the group consisting of SEQ ID NOS: 6, 8, 10, 19, 21, 23, 25, 34, 36, 38, 44, 46, 52, 54, 60, 76, 79, 81, 83, 89, 91, 93, 95, 101, 103, 114, 116, 124, 147, 149, 151, 153, 155, 157, 159, 165, 171, 173, 179, 181, 187, 189, and 191 shown in Tables 1-21.

[0025] The invention further provides an isolated polypeptide, comprising the amino acid sequence of an epitope of the amino acid sequence of a CA polypeptide selected from the group consisting of SEQ ID NOS: 6, 8, 10, 19, 21, 23, 25, 34, 36, 38, 44, 46, 52, 54, 60, 76, 79, 81, 83, 89, 91, 93, 95, 101, 103, 114, 116, 124, 147, 149, 151, 153, 155, 157, 159, 165, 171, 173, 179, 181, 187, 189, and 191 shown in Tables 1-21, wherein the polypeptide or fragment thereof may be attached to a solid support. In one embodiment the invention provides an isolated antibody (monoclonal or polyclonal) or antigen binding fragment thereof, that binds to such a polypeptide. The isolated antibody or antigen binding fragment thereof may be attached to a solid support, or further comprises a detectable label.

[0026] In one embodiment, the invention provides a kit for diagnosing the presence of cancer in a test sample, said kit comprising at least one polynucleotide that selectively hybridizes to a CA polynucleotide sequence shown in Tables 1-21, or its complement. In another embodiment. the invention provides an electronic library comprising a CA polynucleotide, a CA polypeptide, or fragment thereof, shown in Tables 1-21.

[0027] In one embodiment, the invention provides a method of screening for anticancer activity comprising: (a) providing a cell that expresses a cancer associated (CA) gene encoded by a nucleic acid sequence selected from the group consisting of the CA sequences shown in Tables 1-21, or fragment thereof; (b) contacting a tissue sample derived from a cancer cell with an anticancer drug candidate; (c) monitoring an effect of the anticancer drug candidate on an expression of the CA polynucleotide in the tissue sample, and optionally (d) comparing the level of expression in the absence of said drug candidate to the level of expression in the presence of the drug candidate.

[0028] In one embodiment, the invention provides a method for detecting cancer associated with expression of a polypeptide in a test cell sample, comprising the steps of: (i) detecting a level of expression of at least one polypeptide selected from the group consisting of SEQ ID NOS: 6, 8, 10, 19, 21, 23, 25, 34, 36, 38, 44, 46, 52, 54, 60, 76, 79, 81, 83, 89, 91, 93, 95, 101, 103, 114, 116, 124, 147, 149, 151, 153, 155, 157, 159, 165, 171, 173, 179, 181, 187, 189, and 191 shown in Tables 1-21, or a fragment thereof; and (ii) comparing the level of expression of the polypeptide in the test sample with a level of expression of polypeptide in a normal cell sample, wherein an altered level of expression of the polypeptide in the test cell sample relative to the level of polypeptide expression in the normal cell sample is indicative of the presence of cancer in the test cell sample.

[0029] In another embodiment, the invention provides a method for detecting cancer associated with expression of a polypeptide in a test cell sample, comprising the steps of: (i) detecting a level of activity of at least one polypeptide selected from the group consisting of SEQ ID NOS: 6, 8, 10, 19, 21, 23, 25, 34, 36, 38, 44, 46, 52, 54, 60, 76, 79, 81, 83, 89, 91, 93, 95, 101, 103, 114, 116, 124, 147, 149, 151, 153, 155, 157, 159, 165, 171, 173, 179, 181, 187, 189, and 191 shown in Tables 1-21, or a fragment thereof, wherein said activity corresponds to at least one activity for the polypeptide listed in Table 23; and (ii) comparing the level of activity of the polypeptide in the test sample with a level of activity of polypeptide in a normal cell sample, wherein an altered level of activity of the polypeptide in the test cell sample relative to the level of polypeptide activity in the normal cell sample is indicative of the presence of cancer in the test cell sample.

[0030] In another embodiment, the invention provides a method for detecting cancer associated with the presence of an antibody in a test serum sample, comprising the steps of: (i) detecting a level of an antibody against an antigenic polypeptide selected from the group consisting of SEQ ID NOS: 6, 8, 10, 19, 21, 23, 25, 34, 36, 38, 44, 46, 52, 54, 60, 76, 79, 81, 83, 89, 91, 93, 95, 101, 103, 114, 116, 124, 147, 149, 151, 153, 155, 157, 159, 165, 171, 173, 179, 181, 187, 189, and 191 shown in Tables 1-21, or antigenic fragment thereof; and (ii) comparing said level of said antibody in the test sample with a level of said antibody in the control sample, wherein an altered level of antibody in said test sample relative to the level of antibody in the control sample is indicative of the presence of cancer in the test serum sample.

[0031] The invention provides a method for screening for a bioactive agent capable of modulating the activity of a CA protein (CAP), wherein said CAP is encoded by a nucleic acid comprising a nucleic acid sequence selected from the group consisting of the polynucleotide sequences SEQ ID NOS: 5, 7, 9, 18, 20, 22, 24, 33, 35, 37, 43, 45, 51, 53, 59, 75, 78, 80, 82, 88, 90, 92, 94, 100, 102, 113, 115, 123, 146, 148, 150, 152, 154, 156, 158, 164, 170, 172, 178, 180, 186, 188, and 190 shown in Tables 1-21, said method comprising: a) combining said CAP and a candidate bioactive agent; and b) determining the effect of the candidate agent on the bioactivity of said CAP. According to the method the bioactive agent: affects the expression of the CA protein (CAP); affects the activity of the CA protein (CAP), wherein such activity is selected from the activities listed in Table 23.

[0032] In one embodiment, the invention provides a method for diagnosing cancer comprising: a) determining the expression of one or more genes comprising a nucleic acid sequence selected from the group consisting of the human genomic and mRNA sequences outlined in Tables 1-21, in a first tissue type of a first individual; and b) comparing said expression of said gene(s) from a second normal tissue type from said first individual or a second unaffected individual; wherein a difference in said expression indicates that the first individual has cancer.

[0033] In another embodiment the invention provides a method for treating cancers comprising administering to a patient a bioactive agent modulating the activity of a CA protein (CAP), wherein said CAP is encoded by a nucleic acid comprising a nucleic acid sequence selected from the group consisting of the human nucleic acid sequences in Tables 1-21 and further wherein the bioactive agent binds to the CA protein; wherein the CA protein: is a G-protein coupled receptor protein wherein the CAP sequence is selected from the group consisting of SEQ ID NOS: 6, 8, 10, 19, 21, 23, and 25; is a nucleotide binding protein wherein the CAP sequence is selected from the group consisting of SEQ ID NOS: 34, 36, 38, 101 and 103; is a nucleic acid binding protein wherein the CAP sequence is selected from the group consisting of SEQ ID NOS: 52, 54, 165, 171 and 173; is a calcium binding protein wherein the CAP sequence is selected from the group consisting of SEQ ID NOS: 187, 189 and 191; is a cysteine-type peptidase wherein the CAP sequence is selected from the group consisting of SEQ ID NOS: 89, 91, 93 and 95; is involved in apoptosis wherein the CAP sequence is selected from the group consisting of SEQ ID NOS: 116, 151 and 157 as shown in Tables 1-21.

[0034] The invention provides monoclonal antibodies that preferentially binds to a CA protein (CAP) that is expressed on a cell surface, wherein the CA protein selected from the group consisting of SEQ ID NOS: 6, 8, 10, 19, 21, 23, 25, 34, 36, 38, 44, 46, 52, 54, 60, 76, 79, 81, 83, 89, 91, 93, 95, 101, 103, 114, 116, 124, 147, 149, 151, 153, 155, 157, 159, 165, 171, 173, 179, 181, 187, 189, and 191; preferably to the extracellular domain of the CA protein; preferably to a CA protein differentially expressed on a cancer cell surface relative to a normal cell surface or preferably to at least one human cancer cell line; preferably linked to a therapeutic agent; or preferably humanized. Kits and pharmaceutical compositions for detecting a presence or an absence of cancer cells in an individual, and comprising such antibodies are also provided.

[0035] The invention also provides a method for detecting a presence or an absence of cancer cells in an individual, the method comprising: contacting cells from the individual with the antibody according to the invention; and detecting a complex of a CAP from the cancer cells and the antibody, wherein detection of the complex correlates with the presence of cancer cells in the individual. In one embodiment the invention provides a method for inhibiting growth of cancer cells in an individual, the method comprising: administering to the individual an effective amount of a pharmaceutical composition according to the invention. In another embodiment the invention provides a method for delivering a therapeutic agent to cancer cells in an individual, the method comprising: administering to the individual an effective amount of a pharmaceutical composition according to according to the invention.

[0036] Novel sequences associated with cancer are also provided herein. Other aspects of the invention will become apparent to the skilled artisan by the following description of the invention.

### BRIEF DESCRIPTION OF THE FIGURES

[0037] FIG. 1 depicts PCR amplification of host-provirus junction fragments.

[0038] FIG. 2 shows an example of average threshold cycle (C_{T}) values for a housekeeper gene and target gene.

[0039] FIG. 3 shows an example of the calculated difference (ΔΔC_{T}) between the C_{T} values of target and housekeeper genes (ΔC_{T}) for various samples.

[0040] FIG. 4 shows the ΔΔC_{T} and comparative expression level for each sample from FIG. 3.

### DETAILED DESCRIPTION OF PREFERRED EMBODIMENTS

[0041] The present invention is directed to a number of sequences associated with cancers, especially lymphoma, breast cancer or prostate cancer. The relatively tight linkage between clonally-integrated proviruses and protooncogenes forms “provirus tagging”, in which slow-transforming retroviruses that act by an insertion mutation mechanism are used to isolate protooncogenes. In some models, uninfected animals have low cancer rates, and infected animals have high cancer rates. It is known that many of the retroviruses involved do not carry transduced host protooncogenes or pathogenic trans-acting viral genes, and thus the cancer incidence must therefore be a direct consequence of proviral integration effects into host protooncogenes. Since proviral integration is random, rare integrants will “activate” host protooncogenes that provide a selective growth advantage, and these rare events result in new proviruses at clonal stoichiometries in tumors. In contrast to mutations caused by chemicals, radiation, or spontaneous errors, protooncogene insertion mutations can be easily located by virtue of the fact that a convenient-sized genetic marker of known sequence (the provirus) is present at the site of mutation. Host sequences that flank clonally integrated proviruses can be cloned using a variety of strategies. Once these sequences are in hand, the tagged protooncogenes can be subsequently identified. The presence of provirus at the same locus in two or more independent tumors is prima facie evidence that a protooncogene is present at or very near the provirus integration sites. This is because the genome is too large for random integrations to result in observable clustering. Any clustering that is detected is unequivocal evidence for biological selection (i.e. the tumor phenotype). Moreover, the pattern of proviral integrants (including orientations) provides compelling positional information that makes localization of the target gene at each cluster relatively simple. The three mammalian retroviruses that are known to cause cancer by an insertion mutation mechanism are FeLV (leukemia/lymphoma in cats), MLV (leukemia/lymphoma in mice and rats), and MMTV (mammary cancer in mice).

[0042] Thus, the use of oncogenic retroviruses, whose sequences insert into the genome of the host organism resulting in cancer, allows the identification of host sequences involved in cancer. These sequences may then be used in a number of different ways, including diagnosis, prognosis, screening for modulators (including both agonists and antagonists), antibody generation (for immunotherapy and imaging), etc. However, as will be appreciated by those in the art, oncogenes that are identified in one type of cancer such as lymphoma or leukemia have a strong likelihood of being involved in other types of cancers as well. Thus, while the sequences outlined herein are initially identified as correlated with lymphoma, they can also be found in other types of cancers as well, outlined below.

### DEFINITIONS

[0043] Accordingly, the present invention provides nucleic acid and protein sequences that are associated with cancer, herein termed “cancer associated” or “CA” sequences. In one embodiment, the present invention provides nucleic acid and protein sequences that are associated with cancers that originate in lymphatic tissue, herein termed “lymphoma associated,” “leukemia associated” or “LA” sequences. In another embodiment, the present invention provides nucleic acid and protein sequences that are associated with carcinomas which originate in breast tissue, herein termed “breast cancer associated” or “BC” sequences.

[0044] Suitable cancers that can be diagnosed or screened for using the methods of the present invention include cancers classified by site or by histological type. Cancers classified by site include cancer of the oral cavity and pharynx (lip, tongue, salivary gland, floor of mouth, gum and other mouth, nasopharynx, tonsil, oropharynx, hypopharynx, other oral/pharynx); cancers of the digestive system (esophagus; stomach; small intestine; colon and rectum; anus, anal canal, and anorectum; liver; intrahepatic bile duct; gallbladder; other biliary; pancreas; retroperitoneum; peritoneum, omentum, and mesentery; other digestive); cancers of the respiratory system (nasal cavity, middle ear, and sinuses; larynx; lung and bronchus; pleura; trachea, mediastinum, and other respiratory); cancers of the mesothelioma; bones and joints; and soft tissue, including heart; skin cancers, including melanomas and other non-epithelial skin cancers; Kaposi's sarcoma and breast cancer; cancer of the female genital system (cervix uteri; corpus uteri; uterus, nos; ovary; vagina; vulva; and other female genital); cancers of the male genital system (prostate gland; testis; penis; and other male genital); cancers of the urinary system (urinary bladder; kidney and renal pelvis; ureter; and other urinary); cancers of the eye and orbit; cancers of the brain and nervous system (brain; and other nervous system); cancers of the endocrine system (thyroid gland and other endocrine, including thymus); lymphomas (Hodgkin's disease and non-Hodgkin's lymphoma), multiple myeloma, and leukemias (lymphocytic leukemia; myeloid leukemia; monocytic leukemia; and other leukemias).

[0045] Other cancers, classified by histological type, that may be associated with the sequences of the invention include, but are not limited to, Neoplasm, malignant; Carcinoma, NOS; Carcinoma, undifferentiated, NOS; Giant and spindle cell carcinoma; Small cell carcinoma, NOS; Papillary carcinoma, NOS; Squamous cell carcinoma, NOS; Lymphoepithelial carcinoma; Basal cell carcinoma, NOS; Pilomatrix carcinoma; Transitional cell carcinoma, NOS; Papillary transitional cell carcinoma; Adenocarcinoma, NOS; Gastrinoma, malignant; Cholangiocarcinoma; Hepatocellular carcinoma, NOS; Combined hepatocellular carcinoma and cholangiocarcinoma; Trabecular adenocarcinoma; Adenoid cystic carcinoma; Adenocarcinoma in adenomatous polyp; Adenocarcinoma, familial polyposis coli; Solid carcinoma, NOS; Carcinoid tumor, malignant; Bronchiolo-alveolar adenocarcinoma; Papillary adenocarcinoma, NOS; Chromophobe carcinoma; Acidophil carcinoma; Oxyphilic adenocarcinoma; Basophil carcinoma; Clear cell adenocarcinoma, NOS; Granular cell carcinoma; Follicular adenocarcinoma, NOS; Papillary and follicular adenocarcinoma; Nonencapsulating sclerosing carcinoma; Adrenal cortical carcinoma; Endometroid carcinoma; Skin appendage carcinoma; Apocrine adenocarcinoma; Sebaceous adenocarcinoma; Ceruminous adenocarcinoma; Mucoepidermoid carcinoma; Cystadenocarcinoma, NOS; Papillary cystadenocarcinoma, NOS; Papillary serous cystadenocarcinoma; Mucinous cystadenocarcinoma, NOS; Mucinous adenocarcinoma; Signet ring cell carcinoma; Infiltrating duct carcinoma; Medullary carcinoma, NOS; Lobular carcinoma; Inflammatory carcinoma; Paget's disease, mammary; Acinar cell carcinoma; Adenosquamous carcinoma; Adenocarcinoma w/ squamous metaplasia; Thymoma, malignant; Ovarian stromal tumor, malignant; Thecoma, malignant; Granulosa cell tumor, malignant; Androblastoma, malignant; Sertoli cell carcinoma; Leydig cell tumor, malignant; Lipid cell tumor, malignant; Paraganglioma, malignant; Extra-mammary paraganglioma, malignant; Pheochromocytoma; Glomangiosarcoma; Malignant melanoma, NOS; Amelanotic melanoma; Superficial spreading melanoma; Malig melanoma in giant pigmented nevus; Epithelioid cell melanoma; Blue nevus, malignant; Sarcoma, NOS; Fibrosarcoma, NOS; Fibrous histiocytoma, malignant; Myxosarcoma; Liposarcoma, NOS; Leiomyosarcoma, NOS; Rhabdomyosarcoma, NOS; Embryonal rhabdomyosarcoma; Alveolar rhabdomyosarcoma; Stromal sarcoma, NOS; Mixed tumor, malignant, NOS; Mullerian mixed tumor; Nephroblastoma; Hepatoblastoma; Carcinosarcoma, NOS; Mesenchymoma, malignant; Brenner tumor, malignant; Phyllodes tumor, malignant; Synovial sarcoma, NOS; Mesothelioma, malignant; Dysgerminoma; Embryonal carcinoma, NOS; Teratoma, malignant, NOS; Struma ovarii, malignant; Choriocarcinoma; Mesonephroma, malignant; Hemangiosarcoma; Hemangioendothelioma, malignant; Kaposi's sarcoma; Hemangiopericytoma, malignant; Lymphangiosarcoma; Osteosarcoma, NOS; Juxtacortical osteosarcoma; Chondrosarcoma, NOS; Chondroblastoma, malignant; Mesenchymal chondrosarcoma; Giant cell tumor of bone; Ewing's sarcoma; Odontogenic tumor, malignant; Ameloblastic odontosarcoma; Ameloblastoma, malignant; Ameloblastic fibrosarcoma; Pinealoma, malignant; Chordoma; Glioma, malignant; Ependymoma, NOS; Astrocytoma, NOS; Protoplasmic astrocytoma; Fibrillary astrocytoma; Astroblastoma; Glioblastoma, NOS; Oligodendroglioma, NOS; Oligodendroblastoma; Primitive neuroectodermal; Cerebellar sarcoma, NOS; Ganglioneuroblastoma; Neuroblastoma, NOS; Retinoblastoma, NOS; Olfactory neurogenic tumor; Meningioma, malignant; Neurofibrosarcoma; Neurilemmoma, malignant; Granular cell tumor, malignant; Malignant lymphoma, NOS; Hodgkin's disease, NOS; Hodgkin's; paragranuloma, NOS; Malignant lymphoma, small lymphocytic; Malignant lymphoma, large cell, diffuse; Malignant lymphoma, follicular, NOS; Mycosis fungoides; Other specified non-Hodgkin's lymphomas; Malignant histiocytosis; Multiple myeloma; Mast cell sarcoma; Immunoproliferative small intestinal disease; Leukemia, NOS; Lymphoid leukemia, NOS; Plasma cell leukemia; Erythroleukemia; Lymphosarcoma cell leukemia; Myeloid leukemia, NOS; Basophilic leukemia; Eosinophilic leukemia; Monocytic leukemia, NOS; Mast cell leukemia; Megakaryoblastic leukemia; Myeloid sarcoma; and Hairy cell leukemia.

[0046] In addition, the CA genes may be involved in other diseases such as, but not limited to, diseases associated with aging or neurodegeneration.

[0047] “Association” in this context means that the nucleotide or protein sequences are either differentially expressed, activated, inactivated or altered in cancers as compared to normal tissue. As outlined below, CA sequences include those that are up-regulated (i.e. expressed at a higher level), as well as those that are down-regulated (i.e. expressed at a lower level), in cancers. CA sequences also include sequences that have been altered (i.e., truncated sequences or sequences with substitutions, deletions or insertions, including point mutations) and show either the same expression profile or an altered profile. In a preferred embodiment, the CA sequences are from humans; however, as will be appreciated by those in the art, CA sequences from other organisms may be useful in animal models of disease and drug evaluation; thus, other CA sequences are provided, from vertebrates, including mammals, including rodents (rats, mice, hamsters, guinea pigs, etc.), primates, and farm animals (including sheep, goats, pigs, cows, horses, etc). In some cases, prokaryotic CA sequences may be useful. CA sequences from other organisms may be obtained using the techniques outlined below.

[0048] CA sequences include both nucleic acid and amino acid sequences. In a preferred embodiment, the CA sequences are recombinant nucleic acids. By the term “recombinant nucleic acid” herein is meant nucleic acid, originally formed in vitro, in general, by the manipulation of nucleic acid by polymerases and endonucleases, in a form not normally found in nature. Thus a recombinant nucleic acid is also an isolated nucleic acid, in a linear form, or cloned in a vector formed in vitro by ligating DNA molecules that are not normally joined, are both considered recombinant for the purposes of this invention. It is understood that once a recombinant nucleic acid is made and reintroduced into a host cell or organism, it will replicate using the in vivo cellular machinery of the host cell rather than in vitro manipulations; however, such nucleic acids, once produced recombinantly, although subsequently replicated in vivo, are still considered recombinant or isolated for the purposes of the invention. As used herein a “polynucleotide” or “nucleic acid” is a polymeric form of nucleotides of any length, either ribonucleotides or deoxyribonucleotides. This term refers only to the primary structure of the molecule. Thus, this term includes double- and single-stranded DNA and RNA. It also includes known types of modifications, for example, labels which are known in the art, methylation, “caps”, substitution of one or more of the naturally occurring nucleotides with an analog, internucleotide modifications such as, for example, those with uncharged linkages (e.g., phosphorothioates, phosphorodithioates, etc.), those containing pendant moieties, such as, for example proteins (including e.g., nucleases, toxins, antibodies, signal peptides, poly-L-lysine, etc.), those with intercalators (e.g., acridine, psoralen, etc.), those containing chelators (e.g., metals, radioactive metals, etc.), those containing alkylators, those with modified linkages (e.g., alpha anomeric nucleic acids, etc.), as well as unmodified forms of the polynucleotide.

[0049] As used herein, a polynucleotide “derived from” a designated sequence refers to a polynucleotide sequence which is comprised of a sequence of approximately at least about 6 nucleotides, preferably at least about 8 nucleotides, more preferably at least about 10-12 nucleotides, and even more preferably at least about 15-20 nucleotides corresponding to a region of the designated nucleotide sequence. “Corresponding” means homologous to or complementary to the designated sequence. Preferably, the sequence of the region from which the polynucleotide is derived is homologous to or complementary to a sequence that is unique to a CA gene.

[0050] Similarly, a “recombinant protein” is a protein made using recombinant techniques, i.e. through the expression of a recombinant nucleic acid as depicted above. A recombinant protein is distinguished from naturally occurring protein by at least one or more characteristics. For example, the protein may be isolated or purified away from some or all of the proteins and compounds with which it is normally associated in its wild type host, and thus may be substantially pure. For example, an isolated protein is unaccompanied by at least some of the material with which it is normally associated in its natural state, preferably constituting at least about 0.5%, more preferably at least about 5% by weight of the total protein in a given sample. A substantially pure protein comprises about 50-75% by weight of the total protein, with about 80% being preferred, and about 90% being particularly preferred. The definition includes the production of a CA protein from one organism in a different organism or host cell. Alternatively, the protein may be made at a significantly higher concentration than is normally seen, through the use of an inducible promoter or high expression promoter, such that the protein is made at increased concentration levels. Alternatively, the protein may be in a form not normally found in nature, as in the addition of an epitope tag or amino acid substitutions, insertions and deletions, as discussed below.

[0051] In a preferred embodiment, the CA sequences are nucleic acids. As will be appreciated by those in the art and is more fully outlined below, CA sequences are useful in a variety of applications, including diagnostic applications, which will detect naturally occurring nucleic acids, as well as screening applications; for example, biochips comprising nucleic acid probes to the CA sequences can be generated. In the broadest sense, use of “nucleic acid,” “polynucleotide” or “oligonucleotide” or equivalents herein means at least two nucleotides covalently linked together. In some embodiments, an oligonucleotide is an oligomer of 6, 8, 10, 12, 20, 30 or up to 100 nucleotides. A “polynucleotide” or “oligonucleotide” may comprise DNA, RNA, PNA or a polymer of nucleotides linked by phosphodiester and/or any alternate bonds.

[0052] A nucleic acid of the present invention generally contains phosphodiester bonds, although in some cases, as outlined below (for example, in antisense applications or when a nucleic acid is a candidate drug agent), nucleic acid analogs may have alternate backbones, comprising, for example, phosphoramidate (Beaucage et al., Tetrahedron 49(10):1925 (1993) and references therein; Letsinger, J. Org. Chem. 35:3800 (1970); Sprinzl et al., Eur. J. Biochem. 81:579 (1977); Letsinger et al., Nucl. Acids Res. 14:3487 (1986); Sawai et al, Chem. Lett. 805 (1984), Letsinger et al., J. Am. Chem. Soc. 110:4470 (1988); and Pauwels et al., Chemica Scripta 26:141 91986)), phosphorothioate (Mag et al., Nucleic Acids Res. 19:1437 (1991); and U.S. Pat. No. 5,644,048), phosphorodithioate (Briu et al., J. Am. Chem. Soc. 111:2321 (1989), O-methylphosphoroamidite linkages (see Eckstein, Oligonucleotides and Analogues: A Practical Approach, Oxford University Press), and peptide nucleic acid backbones and linkages (see Egholm, J. Am. Chem. Soc. 114:1895 (1992); Meier et al., Chem. Int. Ed. Engl. 31:1008 (1992); Nielsen, Nature, 365:566 (1993); Carlsson et al., Nature 380:207 (1996), all of which are incorporated by reference). Other analog nucleic acids include those with positive backbones (Denpcy et al., Proc. Natl. Acad. Sci. USA 92:6097 (1995); non-ionic backbones (U.S. Pat. Nos. 5,386,023, 5,637,684, 5,602,240, 5,216,141 and 4,469,863; Kiedrowshi et al., Angew. Chem. Intl. Ed. English 30:423 (1991); Letsinger et al., J. Am. Chem. Soc. 110:4470 (1988); Letsinger et al., Nucleoside & Nucleotide 13:1597 (1994); Chapters 2 and 3, ASC Symposium Series 580, “Carbohydrate Modifications in Antisense Research”, Ed. Y. S. Sanghui and P. Dan Cook; Mesmaeker et al., Bioorganic & Medicinal Chem. Lett. 4:395 (1994); Jeffs et al., J. Biomolecular NMR 34:17 (1994); Tetrahedron Lett. 37:743 (1996)) and non-ribose backbones, including those described in U.S. Pat. Nos. 5,235,033 and 5,034,506, and Chapters 6 and 7, ASC Symposium Series 580, “Carbohydrate Modifications in Antisense Research”, Ed. Y. S. Sanghui and P. Dan Cook. Nucleic acids containing one or more carbocyclic sugars are also included within one definition of nucleic acids (see Jenkins et al., Chem. Soc. Rev. (1995) pp 169-176). Several nucleic acid analogs are described in Rawls, C & E News Jun. 2, 1997 page 35. All of these references are hereby expressly incorporated by reference. These modifications of the ribose-phosphate backbone may be done for a variety of reasons, for example to increase the stability and half-life of such molecules in physiological environments for use in anti-sense applications or as probes on a biochip.

[0053] As will be appreciated by those in the art, all of these nucleic acid analogs may find use in the present invention. In addition, mixtures of naturally occurring nucleic acids and analogs can be made; alternatively, mixtures of different nucleic acid analogs, and mixtures of naturally occurring nucleic acids and analogs may be made.

[0054] The nucleic acids may be single stranded or double stranded, as specified, or contain portions of both double stranded or single stranded sequence. As will be appreciated by those in the art, the depiction of a single strand “Watson” also defines the sequence of the other strand “Crick”; thus the sequences described herein also includes the complement of the sequence. The nucleic acid may be DNA, both genomic and cDNA, RNA, or a hybrid, where the nucleic acid contains any combination of deoxyribo- and ribo-nucleotides, and any combination of bases, including uracil, adenine, thymine, cytosine, guanine, inosine, xanthine, hypoxanthine, isocytosine, isoguanine, etc. As used herein, the term “nucleoside” includes nucleotides and nucleoside and nucleotide analogs, and modified nucleosides such as amino modified nucleosides. In addition, “nucleoside” includes non-naturally occurring analog structures. Thus for example the individual units of a peptide nucleic acid, each containing a base, are referred to herein as a nucleoside.

[0055] As used herein, the term “tag,” “sequence tag” or “primer tag sequence” refers to an oligonucleotide with specific nucleic acid sequence that serves to identify a batch of polynucleotides bearing such tags therein. Polynucleotides from the same biological source are covalently tagged with a specific sequence tag so that in subsequent analysis the polynucleotide can be identified according to its source of origin. The sequence tags also serve as primers for nucleic acid amplification reactions.

[0056] A “microarray” is a linear or two-dimensional array of preferably discrete regions, each having a defined area, formed on the surface of a solid support. The density of the discrete regions on a microarray is determined by the total numbers of target polynucleotides to be detected on the surface of a single solid phase support, preferably at least about 50/cm², more preferably at least about 100/cm², even more preferably at least about 500/cm², and still more preferably at least about 1,000/cm². As used herein, a DNA microarray is an array of oligonucleotide primers placed on a chip or other surfaces used to amplify or clone target polynucleotides. Since the position of each particular group of primers in the array is known, the identities of the target polynucleotides can be determined based on their binding to a particular position in the microarray.

[0057] A “linker” is a synthetic oligodeoxyribonucleotide that contains a restriction site. A linker may be blunt end-ligated onto the ends of DNA fragments to create restriction sites that can be used in the subsequent cloning of the fragment into a vector molecule.

[0058] The term “label” refers to a composition capable of producing a detectable signal indicative of the presence of the target polynucleotide in an assay sample. Suitable labels include radioisotopes, nucleotide chromophores, enzymes, substrates, fluorescent molecules, chemiluminescent moieties, magnetic particles, bioluminescent moieties, and the like. As such, a label is any composition detectable by spectroscopic, photochemical, biochemical, immunochemical, electrical, optical, chemical, or any other appropriate means. The term “label” is used to refer to any chemical group or moiety having a detectable physical property or any compound capable of causing a chemical group or moiety to exhibit a detectable physical property, such as an enzyme that catalyzes conversion of a substrate into a detectable product. The term “label” also encompasses compounds that inhibit the expression of a particular physical property. The label may also be a compound that is a member of a binding pair, the other member of which bears a detectable physical property.

[0059] The term “support” refers to conventional supports such as beads, particles, dipsticks, fibers, filters, membranes, and silane or silicate supports such as glass slides.

[0060] The term “amplify” is used in the broad sense to mean creating an amplification product which may include, for example, additional target molecules, or target-like molecules or molecules complementary to the target molecule, which molecules are created by virtue of the presence of the target molecule in the sample. In the situation where the target is a nucleic acid, an amplification product can be made enzymatically with DNA or RNA polymerases or reverse transcriptases.

[0061] As used herein, a “biological sample” refers to a sample of tissue or fluid isolated from an individual, including but not limited to, for example, blood, plasma, serum, spinal fluid, lymph fluid, skin, respiratory, intestinal and genitourinary tracts, tears, saliva, milk, cells (including but not limited to blood cells), tumors, organs, and also samples of in vitro cell culture constituents.

[0062] The term “biological sources” as used herein refers to the sources from which the target polynucleotides are derived. The source can be of any form of “sample” as described above, including but not limited to, cell, tissue or fluid. “Different biological sources” can refer to different cells/tissues/organs of the same individual, or cells/tissues/organs from different individuals of the same species, or cells/tissues/organs from different species.

### Cancer-Associated Sequences

[0063] The CA sequences of the invention were initially identified by infection of mice with a retrovirus such as murine leukemia virus (MLV) resulting in lymphoma. Retroviruses have a genome that is made out of RNA. After a retrovirus infects a host cell, a double stranded DNA copy of the retrovirus genome (a “provirus”) is inserted into the genomic DNA of the host cell. The integrated provirus may affect the expression of host genes at or near the site of integration—a phenomenon known as retroviral insertional mutagenesis. Possible changes in the expression of host cell genes include: (i) increased expression of genes near the site of integration resulting from the proximity of elements in the provirus that act as transcriptional promoters and enhancers, (ii) functional inactivation of a gene caused by the integration of a provirus into the gene itself thus preventing the synthesis of a functional gene product, or (iii) expression of a mutated protein that has a different activity to the normal protein. Typically such a protein would be prematurely truncated and lack a regulatory domain near the C terminus. Such a protein might be constitutively active, or act as a dominant negative inhibitor of the normal protein. For example, retrovirus enhancers, including that of SL3-3, are known to act on genes up to approximately 200 kilobases from the insertion site. Moreover, many of these sequences are also involved in other cancers and disease states. Sequences of mouse genes according to this invention, that are identified in this manner are shown as mDxx-yyy in Tables 1-21.

[0064] A CA sequence can be initially identified by substantial nucleic acid and/or amino acid sequence homology to the CA sequences outlined herein. Such homology can be based upon the overall nucleic acid or amino acid sequence, and is generally determined as outlined below, using either homology programs or hybridization conditions.

[0065] In one embodiment, CA sequences are those that are up-regulated in cancers; that is, the expression of these genes is higher in cancer tissue as compared to normal tissue of the same differentiation stage. “Up-regulation” as used herein means increased expression by about 50%, preferably about 100%, more preferably about 150% to about 200%, with up-regulation from 300% to 1000% being preferred.

[0066] In another embodiment, CA sequences are those that are down-regulated in cancers; that is, the expression of these genes is lower in cancer tissue as compared to normal tissue of the same differentiation stage. “Down-regulation” as used herein means decreased expression by about 50%, preferably about 100%, more preferably about 150% to about 200%, with down-regulation from 300% to 1000% to no expression being preferred.

[0067] In yet another embodiment, CA sequences are those that have altered sequences but show either the same or an altered expression profile as compared to normal lymphoid tissue of the same differentiation stage. “Altered CA sequences” as used herein also refers to sequences that are truncated, contain insertions or contain point mutations.

[0068] CA proteins of the present invention may be classified as secreted proteins, transmembrane proteins or intracellular proteins. In a preferred embodiment the CA protein is an intracellular protein. Intracellular proteins may be found in the cytoplasm and/or in the nucleus. Intracellular proteins are involved in all aspects of cellular function and replication (including, for example, signaling pathways); aberrant expression of such proteins results in unregulated or disregulated cellular processes. For example, many intracellular proteins have enzymatic activity such as protein kinase activity, protein phosphatase activity, protease activity, nucleotide cyclase activity, polymerase activity and the like. Intracellular proteins also serve as docking proteins that are involved in organizing complexes of proteins, or targeting proteins to various subcellular localizations, and are involved in maintaining the structural integrity of organelles.

[0069] An increasingly appreciated concept in characterizing intracellular proteins is the presence in the proteins of one or more motifs for which defined functions have been attributed. In addition to the highly conserved sequences found in the enzymatic domain of proteins, highly conserved sequences have been identified in proteins that are involved in protein-protein interaction. For example, Src-homology-2 (SH2) domains bind tyrosine-phosphorylated targets in a sequence dependent manner. PTB domains, which are distinct from SH2 domains, also bind tyrosine phosphorylated targets. SH3 domains bind to proline-rich targets. In addition, PH domains, tetratricopeptide repeats and WD domains to name only a few, have been shown to mediate protein-protein interactions. Some of these may also be involved in binding to phospholipids or other second messengers. As will be appreciated by one of ordinary skill in the art, these motifs can be identified on the basis of primary sequence; thus, an analysis of the sequence of proteins may provide insight into both the enzymatic potential of the molecule and/or molecules with which the protein may associate.

[0070] In a preferred embodiment, the CA sequences are transmembrane proteins. Transmembrane proteins are molecules that span the phospholipid bilayer of a cell. They may have an intracellular domain, an extracellular domain, or both. The intracellular domains of such proteins may have a number of functions including those already described for intracellular proteins. For example, the intracellular domain may have enzymatic activity and/or may serve as a binding site for additional proteins. Frequently the intracellular domain of transmembrane proteins serves both roles. For example certain receptor tyrosine kinases have both protein kinase activity and SH2 domains. In addition, autophosphorylation of tyrosines on the receptor molecule itself creates binding sites for additional SH2 domain containing proteins.

[0071] Transmembrane proteins may contain from one to many transmembrane domains. For example, receptor tyrosine kinases, certain cytokine receptors, receptor guanylyl cyclases and receptor serine/threonine protein kinases contain a single transmembrane domain. However, various other proteins including channels and adenylyl cyclases contain numerous transmembrane domains. Many important cell surface receptors are classified as “seven transmembrane domain” proteins, as they contain 7 membrane spanning regions. Important transmembrane protein receptors include, but are not limited to insulin receptor, insulin-like growth factor receptor, human growth hormone receptor, glucose transporters, transferrin receptor, epidermal growth factor receptor, low density lipoprotein receptor, leptin receptor, interleukin receptors, e.g. IL-1 receptor, IL-2 receptor, etc. CA proteins may be derived from genes that regulate apoptosis (IL-3, GM-CSF and Bcl-x) or are shown to have a role in the regulation of apoptosis.

[0072] Characteristics of transmembrane domains include approximately 20 consecutive hydrophobic amino acids that may be followed by charged amino acids. Therefore, upon analysis of the amino acid sequence of a particular protein, the localization and number of transmembrane domains within the protein may be predicted.

[0073] The extracellular domains of transmembrane proteins are diverse; however, conserved motifs are found repeatedly among various extracellular domains. Conserved structure and/or functions have been ascribed to different extracellular motifs. For example, cytokine receptors are characterized by a cluster of cysteines and a WSXWS (W=tryptophan, S=serine, X=any amino acid) motif. Immunoglobulin-like domains are highly conserved. Mucin-like domains may be involved in cell adhesion and leucine-rich repeats participate in protein-protein interactions.

[0074] Many extracellular domains are involved in binding to other molecules. In one aspect, extracellular domains are receptors. Factors that bind the receptor domain include circulating ligands, which may be peptides, proteins, or small molecules such as adenosine and the like. For example, growth factors such as EGF, FGF and PDGF are circulating growth factors that bind to their cognate receptors to initiate a variety of cellular responses. Other factors include cytokines, mitogenic factors, neurotrophic factors and the like. Extracellular domains also bind to cell-associated molecules. In this respect, they mediate cell-cell interactions. Cell-associated ligands can be tethered to the cell for example via a glycosylphosphatidylinositol (GPI) anchor, or may themselves be transmembrane proteins. Extracellular domains also associate with the extracellular matrix and contribute to the maintenance of the cell structure.

[0075] CA proteins that are transmembrane are particularly preferred in the present invention as they are good targets for immunotherapeutics, as are described herein. In addition, as outlined below, transmembrane proteins can be also useful in imaging modalities.

[0076] It will also be appreciated by those in the art that a transmembrane protein can be made soluble by removing transmembrane sequences, for example through recombinant methods. Furthermore, transmembrane proteins that have been made soluble can be made to be secreted through recombinant means by adding an appropriate signal sequence.

[0077] In a preferred embodiment, the CA proteins are secreted proteins; the secretion of which can be either constitutive or regulated. These proteins have a signal peptide or signal sequence that targets the molecule to the secretory pathway. Secreted proteins are involved in numerous physiological events; by virtue of their circulating nature, they serve to transmit signals to various other cell types. The secreted protein may function in an autocrine manner (acting on the cell that secreted the factor), a paracrine manner (acting on cells in close proximity to the cell that secreted the factor) or an endocrine manner (acting on cells at a distance). Thus secreted molecules find use in modulating or altering numerous aspects of physiology. CA proteins that are secreted proteins are particularly preferred in the present invention as they serve as good targets for diagnostic markers, for example for blood tests.

### CA Sequences and Homologs

[0078] A CA sequence is initially identified by substantial nucleic acid and/or amino acid sequence homology to the CA sequences outlined herein. Such homology can be based upon the overall nucleic acid or amino acid sequence, and is generally determined as outlined below, using either homology programs or hybridization conditions.

[0079] As used herein, a nucleic acid is a “CA nucleic acid” if the overall homology of the nucleic acid sequence to one of the nucleic acids of Tables 1-21 is preferably greater than about 75%, more preferably greater than about 80%, even more preferably greater than about 85% and most preferably greater than 90%. In some embodiments the homology will be as high as about 93 to 95 or 98%. In a preferred embodiment, the sequences that are used to determine sequence identity or similarity are selected from those of the nucleic acids of Tables 1-21. In another embodiment, the sequences are naturally occurring allelic variants of the sequences of the nucleic acids of Tables 1-21. In another embodiment, the sequences are sequence variants as further described herein.

[0080] Homology in this context means sequence similarity or identity, with identity being preferred. A preferred comparison for homology purposes is to compare the sequence containing sequencing errors to the correct sequence. This homology will be determined using standard techniques known in the art, including, but not limited to, the local homology algorithm of Smith & Waterman, Adv. Appl. Math. 2:482 (1981), by the homology alignment algorithm of Needleman & Wunsch, J. Mol. Biol. 48:443 (1970), by the search for similarity method of Pearson & Lipman, PNAS USA 85:2444 (1988), by computerized implementations of these algorithms (GAP, BESTFIT, FASTA, and TFASTA in the Wisconsin Genetics Software Package, Genetics Computer Group, 575 Science Drive, Madison, Wis.), the Best Fit sequence program described by Devereux et al., Nucl. Acid Res. 12:387-395 (1984), preferably using the default settings, or by inspection.

[0081] One example of a useful algorithm is PILEUP. PILEUP creates a multiple sequence alignment from a group of related sequences using progressive, pairwise alignments. It can also plot a tree showing the clustering relationships used to create the alignment. PILEUP uses a simplification of the progressive alignment method of Feng & Doolittle, J. Mol. Evol. 35:351-360 (1987); the method is similar to that described by Higgins & Sharp CABIOS 5:151-153 (1989). Useful PILEUP parameters include a default gap weight of 3.00, a default gap length weight of 0.10, and weighted end gaps.

[0082] Another example of a useful algorithm is the BLAST (Basic Local Alignment Search Tool) algorithm, described in Altschul et al., J. Mol. Biol. 215, 403-410, (1990) and Karlin et al., PNAS USA 90:5873-5787 (1993). A particularly useful BLAST program is the WU-BLAST-2 program which was obtained from Altschul et al., Methods in Enzymology, 266: 460-480 (1996); http://blast.wustl.edu/]. WU-BLAST-2 uses several search parameters, most of which are set to the default values. The adjustable parameters are set with the following values: overlap span=1, overlap fraction=0.125, word threshold (T)=11. The HSP S and HSP S2 parameters are dynamic values and are established by the program itself depending upon the composition of the particular sequence and composition of the particular database against which the sequence of interest is being searched; however, the values may be adjusted to increase sensitivity. A percent amino acid sequence identity value is determined by the number of matching identical residues divided by the total number of residues of the “longer” sequence in the aligned region. The “longer” sequence is the one having the most actual residues in the aligned region (gaps introduced by WU-Blast-2 to maximize the alignment score are ignored).

[0083] Thus, “percent (%) nucleic acid sequence identity” is defined as the percentage of nucleotide residues in a candidate sequence that are identical with the nucleotide residues of the nucleic acids of Tables 1-21. A preferred method utilizes the BLASTN module of WU-BLAST-2 set to the default parameters, with overlap span and overlap fraction set to 1 and 0.125, respectively.

[0084] The alignment may include the introduction of gaps in the sequences to be aligned. In addition, for sequences which contain either more or fewer nucleotides than those of the nucleic acids of Tables 1-21, it is understood that the percentage of homology will be determined based on the number of homologous nucleosides in relation to the total number of nucleosides. Thus homology of sequences shorter than those of the sequences identified herein will be determined using the number of nucleosides in the shorter sequence.

[0085] In another embodiment of the invention, polynucleotide compositions are provided that are capable of hybridizing under moderate to high stringency conditions to a polynucleotide sequence provided herein, or a fragment thereof, or a complementary sequence thereof. Hybridization techniques are well known in the art of molecular biology. For purposes of illustration, suitable moderately stringent conditions for testing the hybridization of a polynucleotide of this invention with other polynucleotides include prewashing in a solution of 5×SSC (“saline sodium citrate”; 9 mM NaCl, 0.9 mM sodium citrate), 0.5% SDS, 1.0 mM EDTA (pH 8.0); hybridizing at 50-60° C., 5×SSC, overnight; followed by washing twice at 65° C. for 20 minutes with each of 2×, 0.5× and 0.2×SSC containing 0.1% SDS. One skilled in the art will understand that the stringency of hybridization can be readily manipulated, such as by altering the salt content of the hybridization solution and/or the temperature at which the hybridization is performed. For example, in another embodiment, suitable highly stringent hybridization conditions include those described above, with the exception that the temperature of hybridization is increased, e.g., to 60-65° C., or 65-70° C. Stringent conditions may also be achieved with the addition of destabilizing agents such as formamide.

[0086] Thus nucleic acids that hybridize under high stringency to the nucleic acids identified in the figures, or their complements, are considered CA sequences. High stringency conditions are known in the art; see for example Maniatis et al., Molecular Cloning: A Laboratory Manual, 2d Edition, 1989, and Short Protocols in Molecular Biology, ed. Ausubel, et al., both of which are hereby incorporated by reference. Stringent conditions are sequence-dependent and will be different in different circumstances. Longer sequences hybridize specifically at higher temperatures. An extensive guide to the hybridization of nucleic acids is found in Tijssen, Techniques in Biochemistry and Molecular Biology—Hybridization with Nucleic Acid Probes, “Overview of principles of hybridization and the strategy of nucleic acid assays” (1993). Generally, stringent conditions are selected to be about 5-10° C. lower than the thermal melting point (Tₘ) for the specific sequence at a defined ionic strength pH. The Tₘ is the temperature (under defined ionic strength, pH and nucleic acid concentration) at which 50% of the probes complementary to the target hybridize to the target sequence at equilibrium (as the target sequences are present in excess, at Tₘ, 50% of the probes are occupied at equilibrium). Stringent conditions will be those in which the salt concentration is less than about 1.0 M sodium ion, typically about 0.01 to 1.0 M sodium ion concentration (or other salts) at pH 7.0 to 8.3 and the temperature is at least about 30° C. for short probes (e.g. 10 to 50 nucleotides) and at least about 60° C. for longer probes (e.g. greater than 50 nucleotides). In another embodiment, less stringent hybridization conditions are used; for example, moderate or low stringency conditions may be used, as are known in the art; see Maniatis and Ausubel, supra, and Tijssen, supra.

[0087] In addition, the CA nucleic acid sequences of the invention are fragments of larger genes, i.e. they are nucleic acid segments. Alternatively, the CA nucleic acid sequences can serve as indicators of oncogene position, for example, the CA sequence may be an enhancer that activates a protooncogene. “Genes” in this context includes coding regions, non-coding regions, and mixtures of coding and non-coding regions. Accordingly, as will be appreciated by those in the art, using the sequences provided herein, additional sequences of the CA genes can be obtained, using techniques well known in the art for cloning either longer sequences or the full-length sequences; see Maniatis et al., and Ausubel, et al., supra, hereby expressly incorporated by reference. In general, this is done using PCR, for example, kinetic PCR.

### Detection of CA Expression

[0088] Once the CA nucleic acid is identified, it can be cloned and, if necessary, its constituent parts recombined to form the entire CA nucleic acid. Once isolated from its natural source, e.g., contained within a plasmid or other vector or excised therefrom as a linear nucleic acid segment, the recombinant CA nucleic acid can be further used as a probe to identify and isolate other CA nucleic acids, for example additional coding regions. It can also be used as a “precursor” nucleic acid to make modified or variant CA nucleic acids and proteins. In a preferred embodiment, once a CA gene is identified its nucleotide sequence is used to design probes specific for the CA gene.

[0089] The CA nucleic acids of the present invention are used in several ways. In a first embodiment, nucleic acid probes hybridizable to CA nucleic acids are made and attached to biochips to be used in screening and diagnostic methods, or for gene therapy and/or antisense applications. Alternatively, the CA nucleic acids that include coding regions of CA proteins can be put into expression vectors for the expression of CA proteins, again either for screening purposes or for administration to a patient.

[0090] Recent developments in DNA microarray technology make it possible to conduct a large scale assay of a plurality of target CA nucleic acid molecules on a single solid phase support. U.S. Pat. No. 5,837,832 (Chee et al.) and related patent applications describe immobilizing an array of oligonucleotide probes for hybridization and detection of specific nucleic acid sequences in a sample. Target polynucleotides of interest isolated from a tissue of interest are hybridized to the DNA chip and the specific sequences detected based on the target polynucleotides' preference and degree of hybridization at discrete probe locations. One important use of arrays is in the analysis of differential gene expression, where the profile of expression of genes in different cells, often a cell of interest and a control cell, is compared and any differences in gene expression among the respective cells are identified. Such information is useful for the identification of the types of genes expressed in a particular cell or tissue type and diagnosis of cancer conditions based on the expression profile.

[0091] Typically, RNA from the sample of interest is subjected to reverse transcription to obtain labeled cDNA. See U.S. Pat. No. 6,410,229 (Lockhart et al.) The cDNA is then hybridized to oligonucleotides or cDNAs of known sequence arrayed on a chip or other surface in a known order. The location of the oligonucleotide to which the labeled cDNA hybridizes provides sequence information on the cDNA, while the amount of labeled hybridized RNA or cDNA provides an estimate of the relative representation of the RNA or cDNA of interest. See Schena, et al. Science 270:467-470 (1995). For example, use of a cDNA microarray to analyze gene expression patterns in human cancer is described by DeRisi, et al. (Nature Genetics 14:457-460 (1996)).

[0092] In a preferred embodiment, nucleic acid probes corresponding to CA nucleic acids (both the nucleic acid sequences outlined in the figures and/or the complements thereof) are made. Typically, these probes are synthesized based on the disclosed sequences of this invention. The nucleic acid probes attached to the biochip are designed to be substantially complementary to the CA nucleic acids, i.e. the target sequence (either the target sequence of the sample or to other probe sequences, for example in sandwich assays), such that specific hybridization of the target sequence and the probes of the present invention occurs. As outlined below, this complementarity need not be perfect, in that there may be any number of base pair mismatches that will interfere with hybridization between the target sequence and the single stranded nucleic acids of the present invention. It is expected that the overall homology of the genes at the nucleotide level probably will be about 40% or greater, probably about 60% or greater, and even more probably about 80% or greater; and in addition that there will be corresponding contiguous sequences of about 8-12 nucleotides or longer. However, if the number of mutations is so great that no hybridization can occur under even the least stringent of hybridization conditions, the sequence is not a complementary target sequence. Thus, by “substantially complementary” herein is meant that the probes are sufficiently complementary to the target sequences to hybridize under normal reaction conditions, particularly high stringency conditions, as outlined herein. Whether or not a sequence is unique to a CA gene according to this invention can be determined by techniques known to those of skill in the art. For example, the sequence can be compared to sequences in databanks, e.g., GeneBank, to determine whether it is present in the uninfected host or other organisms. The sequence can also be compared to the known sequences of other viral agents, including those that are known to induce cancer.

[0093] A nucleic acid probe is generally single stranded but can be partly single and partly double stranded. The strandedness of the probe is dictated by the structure, composition, and properties of the target sequence. In general, the oligonucleotide probes range from about 6, 8, 10, 12, 15, 20, 30 to about 100 bases long, with from about 10 to about 80 bases being preferred, and from about 30 to about 50 bases being particularly preferred. That is, generally entire genes are rarely used as probes. In some embodiments, much longer nucleic acids can be used, up to hundreds of bases. The probes are sufficiently specific to hybridize to complementary template sequence under conditions known by those of skill in the art. The number of mismatches between the probes sequences and their complementary template (target) sequences to which they hybridize during hybridization generally do not exceed 15%, usually do not exceed 10% and preferably do not exceed 5%, as determined by FASTA (default settings).

[0094] Oligonucleotide probes can include the naturally-occurring heterocyclic bases normally found in nucleic acids (uracil, cytosine, thymine, adenine and guanine), as well as modified bases and base analogues. Any modified base or base analogue compatible with hybridization of the probe to a target sequence is useful in the practice of the invention. The sugar or glycoside portion of the probe can comprise deoxyribose, ribose, and/or modified forms of these sugars, such as, for example, 2′-O-alkyl ribose. In a preferred embodiment, the sugar moiety is 2′-deoxyribose; however, any sugar moiety that is compatible with the ability of the probe to hybridize to a target sequence can be used.

[0095] In one embodiment, the nucleoside units of the probe are linked by a phosphodiester backbone, as is well known in the art. In additional embodiments, internucleotide linkages can include any linkage known to one of skill in the art that is compatible with specific hybridization of the probe including, but not limited to phosphorothioate, methylphosphonate, sulfamate (e.g., U.S. Pat. No. 5,470,967) and polyamide (i.e., peptide nucleic acids). Peptide nucleic acids are described in Nielsen et al. (1991) Science 254: 1497-1500, U.S. Pat. No. 5,714,331, and Nielsen (1999) Curr. Opin. Biotechnol. 10:71-75.

[0096] In certain embodiments, the probe can be a chimeric molecule; i.e., can comprise more than one type of base or sugar subunit, and/or the linkages can be of more than one type within the same primer. The probe can comprise a moiety to facilitate hybridization to its target sequence, as are known in the art, for example, intercalators and/or minor groove binders. Variations of the bases, sugars, and internucleoside backbone, as well as the presence of any pendant group on the probe, will be compatible with the ability of the probe to bind, in a sequence-specific fashion, with its target sequence. A large number of structural modifications, both known and to be developed, are possible within these bounds. Advantageously, the probes according to the present invention may have structural characteristics such that they allow the signal amplification, such structural characteristics being, for example, branched DNA probes as those described by Urdea et al. (Nucleic Acids Symp. Ser., 24:197-200 (1991)) or in the European Patent No. EP-0225,807. Moreover, synthetic methods for preparing the various heterocyclic bases, sugars, nucleosides and nucleotides that form the probe, and preparation of oligonucleotides of specific predetermined sequence, are well-developed and known in the art. A preferred method for oligonucleotide synthesis incorporates the teaching of U.S. Pat. No. 5,419,966.

[0097] Multiple probes may be designed for a particular target nucleic acid to account for polymorphism and/or secondary structure in the target nucleic acid, redundancy of data and the like. In some embodiments, where more than one probe per sequence is used, either overlapping probes or probes to different sections of a single target CA gene are used. That is, two, three, four or more probes, with three being preferred, are used to build in a redundancy for a particular target. The probes can be overlapping (i.e. have some sequence in common), or specific for distinct sequences of a CA gene. When multiple target polynucleotides are to be detected according to the present invention, each probe or probe group corresponding to a particular target polynucleotide is situated in a discrete area of the microarray.

[0098] Probes may be in solution, such as in wells or on the surface of a micro-array, or attached to a solid support. Examples of solid support materials that can be used include a plastic, a ceramic, a metal, a resin, a gel and a membrane. Useful types of solid supports include plates, beads, magnetic material, microbeads, hybridization chips, membranes, crystals, ceramics and self-assembling monolayers. A preferred embodiment comprises a two-dimensional or three-dimensional matrix, such as a gel or hybridization chip with multiple probe binding sites (Pevzner et al., J. Biomol. Struc. & Dyn. 9:399-410, 1991; Maskos and Southern, Nuc. Acids Res. 20:1679-84, 1992). Hybridization chips can be used to construct very large probe arrays that are subsequently hybridized with a target nucleic acid. Analysis of the hybridization pattern of the chip can assist in the identification of the target nucleotide sequence. Patterns can be manually or computer analyzed, but it is clear that positional sequencing by hybridization lends itself to computer analysis and automation. Algorithms and software, which have been developed for sequence reconstruction, are applicable to the methods described herein (R. Drmanac et al., J. Biomol. Struc. & Dyn. 5:1085-1102, 1991; P. A. Pevzner, J. Biomol. Struc. & Dyn. 7:63-73, 1989).

[0099] As will be appreciated by those in the art, nucleic acids can be attached or immobilized to a solid support in a wide variety of ways. By “immobilized” herein is meant the association or binding between the nucleic acid probe and the solid support is sufficient to be stable under the conditions of binding, washing, analysis, and removal as outlined below. The binding can be covalent or non-covalent. By “non-covalent binding” and grammatical equivalents herein is meant one or more of either electrostatic, hydrophilic, and hydrophobic interactions. Included in non-covalent binding is the covalent attachment of a molecule, such as streptavidin, to the support and the non-covalent binding of the biotinylated probe to the streptavidin. By “covalent binding” and grammatical equivalents herein is meant that the two moieties, the solid support and the probe, are attached by at least one bond, including sigma bonds, pi bonds and coordination bonds. Covalent bonds can be formed directly between the probe and the solid support or can be formed by a cross linker or by inclusion of a specific reactive group on either the solid support or the probe or both molecules. Immobilization may also involve a combination of covalent and non-covalent interactions.

[0100] Nucleic acid probes may be attached to the solid support by covalent binding such as by conjugation with a coupling agent or by, covalent or non-covalent binding such as electrostatic interactions, hydrogen bonds or antibody-antigen coupling, or by combinations thereof. Typical coupling agents include biotin/avidin, biotin/streptavidin, Staphylococcus aureus protein A/IgG antibody Fc fragment, and streptavidin/protein A chimeras (T. Sano and C. R. Cantor, Bio/Technology 9:1378-81 (1991)), or derivatives or combinations of these agents. Nucleic acids may be attached to the solid support by a photocleavable bond, an electrostatic bond, a disulfide bond, a peptide bond, a diester bond or a combination of these sorts of bonds. The array may also be attached to the solid support by a selectively releasable bond such as 4,4′-dimethoxytrityl or its derivative. Derivatives which have been found to be useful include 3 or 4 [bis-(4-methoxyphenyl)]-methyl-benzoic acid, N-succinimidyl-3 or 4 [bis-(4-methoxyphenyl)]-methyl-benzoic acid, N-succinimidyl-3 or 4 [bis-(4-methoxyphenyl)]-hydroxymethyl-benzoic acid, N-succinimidyl-3 or 4 [bis-(4-methoxyphenyl)]-chloromethyl-benzoic acid, and salts of these acids.

[0101] In general, the probes are attached to the biochip in a wide variety of ways, as will be appreciated by those in the art. As described herein, the nucleic acids can either be synthesized first, with subsequent attachment to the biochip, or can be directly synthesized on the biochip.

[0102] The biochip comprises a suitable solid substrate. By “substrate” or “solid support” or other grammatical equivalents herein is meant any material that can be modified to contain discrete individual sites appropriate for the attachment or association of the nucleic acid probes and is amenable to at least one detection method. The solid phase support of the present invention can be of any solid materials and structures suitable for supporting nucleotide hybridization and synthesis. Preferably, the solid phase support comprises at least one substantially rigid surface on which the primers can be immobilized and the reverse transcriptase reaction performed. The substrates with which the polynucleotide microarray elements are stably associated may be fabricated from a variety of materials, including plastics, ceramics, metals, acrylamide, cellulose, nitrocellulose, glass, polystyrene, polyethylene vinyl acetate, polypropylene, polymethacrylate, polyethylene, polyethylene oxide, polysilicates, polycarbonates, Teflon®, fluorocarbons, nylon, silicon rubber, polyanhydrides, polyglycolic acid, polylactic acid, polyorthoesters, polypropylfumerate, collagen, glycosaminoglycans, and polyamino acids. Substrates may be two-dimensional or three-dimensional in form, such as gels, membranes, thin films, glasses, plates, cylinders, beads, magnetic beads, optical fibers, woven fibers, etc. A preferred form of array is a three-dimensional array. A preferred three-dimensional array is a collection of tagged beads. Each tagged bead has different primers attached to it. Tags are detectable by signaling means such as color (Luminex, Illumina) and electromagnetic field (Pharmaseq) and signals on tagged beads can even be remotely detected (e.g., using optical fibers). The size of the solid support can be any of the standard microarray sizes, useful for DNA microarray technology, and the size may be tailored to fit the particular machine being used to conduct a reaction of the invention. In general, the substrates allow optical detection and do not appreciably fluoresce.

[0103] In a preferred embodiment, the surface of the biochip and the probe may be derivatized with chemical functional groups for subsequent attachment of the two. Thus, for example, the biochip is derivatized with a chemical functional group including, but not limited to, amino groups, carboxy groups, oxo groups and thiol groups, with amino groups being particularly preferred. Using these functional groups, the probes can be attached using functional groups on the probes. For example, nucleic acids containing amino groups can be attached to surfaces comprising amino groups, for example using linkers as are known in the art; for example, homo- or hetero-bifunctional linkers as are well known (see 1994 Pierce Chemical Company catalog, technical section on cross-linkers, pages 155-200, incorporated herein by reference). In addition, in some cases, additional linkers, such as alkyl groups (including substituted and heteroalkyl groups) may be used.

[0104] In this embodiment, the oligonucleotides are synthesized as is known in the art, and then attached to the surface of the solid support. As will be appreciated by those skilled in the art, either the 5′ or 3′ terminus may be attached to the solid support, or attachment may be via an internal nucleoside. In an additional embodiment, the immobilization to the solid support may be very strong, yet non-covalent. For example, biotinylated oligonucleotides can be made, which bind to surfaces covalently coated with streptavidin, resulting in attachment.

[0105] The arrays may be produced according to any convenient methodology, such as preforming the polynucleotide microarray elements and then stably associating them with the surface. Alternatively, the oligonucleotides may be synthesized on the surface, as is known in the art. A number of different array configurations and methods for their production are known to those of skill in the art and disclosed in WO 95/25116 and WO 95/35505 (photolithographic techniques), U.S. Pat. No. 5,445,934 (in situ synthesis by photolithography), U.S. Pat. No. 5,384,261 (in situ synthesis by mechanically directed flow paths); and U.S. Pat. No. 5,700,637 (synthesis by spotting, printing or coupling); the disclosure of which are herein incorporated in their entirety by reference. Another method for coupling DNA to beads uses specific ligands attached to the end of the DNA to link to ligand-binding molecules attached to a bead. Possible ligand-binding partner pairs include biotin-avidin/streptavidin, or various antibody/antigen pairs such as digoxygenin-antidigoxygenin antibody (Smith et al., “Direct Mechanical Measurements of the Elasticity of Single DNA Molecules by Using Magnetic Beads,” Science 258:1122-1126 (1992)). Covalent chemical attachment of DNA to the support can be accomplished by using standard coupling agents to link the 5′-phosphate on the DNA to coated microspheres through a phosphoamidate bond. Methods for immobilization of oligonucleotides to solid-state substrates are well established. See Pease et al., Proc. Natl. Acad. Sci. USA 91(11):5022-5026 (1994). A preferred method of attaching oligonucleotides to solid-state substrates is described by Guo et al., Nucleic Acids Res. 22:5456-5465 (1994). Immobilization can be accomplished either by in situ DNA synthesis (Maskos and Southern, Nucleic Acids Research, 20:1679-1684 (1992) or by covalent attachment of chemically synthesized oligonucleotides (Guo et al., supra) in combination with robotic arraying technologies.

[0106] In addition to the solid-phase technology represented by biochip arrays, gene expression can also be quantified using liquid-phase arrays. One such system is kinetic polymerase chain reaction (PCR). Kinetic PCR allows for the simultaneous amplification and quantification of specific nucleic acid sequences. The specificity is derived from synthetic oligonucleotide primers designed to preferentially adhere to single-stranded nucleic acid sequences bracketing the target site. This pair of oligonucleotide primers form specific, non-covalently bound complexes on each strand of the target sequence. These complexes facilitate in vitro transcription of double-stranded DNA in opposite orientations. Temperature cycling of the reaction mixture creates a continuous cycle of primer binding, transcription, and re-melting of the nucleic acid to individual strands. The result is an exponential increase of the target dsDNA product. This product can be quantified in real time either through the use of an intercalating dye or a sequence specific probe. SYBR® Greene I, is an example of an intercalating dye, that preferentially binds to dsDNA resulting in a concomitant increase in the fluorescent signal. Sequence specific probes, such as used with TaqMan® technology, consist of a fluorochrome and a quenching molecule covalently bound to opposite ends of an oligonucleotide. The probe is designed to selectively bind the target DNA sequence between the two primers. When the DNA strands are synthesized during the PCR reaction, the fluorochrome is cleaved from the probe by the exonuclease activity of the polymerase resulting in signal dequenching. The probe signaling method can be more specific than the intercalating dye method, but in each case, signal strength is proportional to the dsDNA product produced. Each type of quantification method can be used in multi-well liquid phase arrays with each well representing primers and/or probes specific to nucleic acid sequences of interest. When used with messenger RNA preparations of tissues or cell lines, an array of probe/primer reactions can simultaneously quantify the expression of multiple gene products of interest. See Germer, S., et al., Genome Res. 10:258-266 (2000); Heid, C. A., et al., Genome Res. 6, 986-994 (1996).

### Expression of CA Proteins

[0107] In a preferred embodiment, CA nucleic acids encoding CA proteins are used to make a variety of expression vectors to express CA proteins which can then be used in screening assays, as described below. The expression vectors may be either self-replicating extrachromosomal vectors or vectors which integrate into a host genome. Generally, these expression vectors include transcriptional and translational regulatory nucleic acid operably linked to the nucleic acid encoding the CA protein. The term “control sequences” refers to DNA sequences necessary for the expression of an operably linked coding sequence in a particular host organism. The control sequences that are suitable for prokaryotes, for example, include a promoter, optionally an operator sequence, and a ribosome binding site. Eukaryotic cells are known to utilize promoters, polyadenylation signals, and enhancers.

[0108] Nucleic acid is “operably linked” when it is placed into a functional relationship with another nucleic acid sequence. For example, DNA for a presequence or secretory leader is operably linked to DNA for a polypeptide if it is expressed as a preprotein that participates in the secretion of the polypeptide; a promoter or enhancer is operably linked to a coding sequence if it affects the transcription of the sequence; or a ribosome binding site is operably linked to a coding sequence if it is positioned so as to facilitate translation. Generally, “operably linked” means that the DNA sequences being linked are contiguous, and, in the case of a secretory leader, contiguous and in reading phase. However, enhancers do not have to be contiguous. Linking is accomplished by ligation at convenient restriction sites. If such sites do not exist, synthetic oligonucleotide adaptors or linkers are used in accordance with conventional practice. The transcriptional and translational regulatory nucleic acid will generally be appropriate to the host cell used to express the CA protein; for example, transcriptional and translational regulatory nucleic acid sequences from Bacillus are preferably used to express the CA protein in Bacillus. Numerous types of appropriate expression vectors, and suitable regulatory sequences are known in the art for a variety of host cells.

[0109] In general, the transcriptional and translational regulatory sequences may include, but are not limited to, promoter sequences, ribosomal binding sites, transcriptional start and stop sequences, translational start and stop sequences, and enhancer or activator sequences. In a preferred embodiment, the regulatory sequences include a promoter and transcriptional start and stop sequences.

[0110] Promoter sequences encode either constitutive or inducible promoters. The promoters may be either naturally occurring promoters or hybrid promoters. Hybrid promoters, which combine elements of more than one promoter, are also known in the art, and are useful in the present invention.

[0111] In addition, the expression vector may comprise additional elements. For example, the expression vector may have two replication systems, thus allowing it to be maintained in two organisms, for example in mammalian or insect cells for expression and in a prokaryotic host for cloning and amplification. Furthermore, for integrating expression vectors, the expression vector contains at least one sequence homologous to the host cell genome, and preferably two homologous sequences that flank the expression construct. The integrating vector may be directed to a specific locus in the host cell by selecting the appropriate homologous sequence for inclusion in the vector. Constructs for integrating vectors are well known in the art.

[0112] In addition, in a preferred embodiment, the expression vector contains a selectable marker gene to allow the selection of transformed host cells. Selection genes are well known in the art and will vary with the host cell used.

[0113] The CA proteins of the present invention are produced by culturing a host cell transformed with an expression vector containing nucleic acid encoding a CA protein, under the appropriate conditions to induce or cause expression of the CA protein. The conditions appropriate for CA protein expression will vary with the choice of the expression vector and the host cell, and will be easily ascertained by one skilled in the art through routine experimentation. For example, the use of constitutive promoters in the expression vector will require optimizing the growth and proliferation of the host cell, while the use of an inducible promoter requires the appropriate growth conditions for induction. In addition, in some embodiments, the timing of the harvest is important. For example, the baculoviral systems used in insect cell expression are lytic viruses, and thus harvest time selection can be crucial for product yield.

[0114] Appropriate host cells include yeast, bacteria, archaebacteria, fungi, and insect, plant and animal cells, including mammalian cells. Of particular interest are Drosophila melanogaster cells, Saccharomyces cerevisiae and other yeasts, E. coli, Bacillus subtilis, Sf9 cells, C129 cells, 293 cells, Neurospora, BHK, CHO, COS, HeLa cells, THP1 cell line (a macrophage cell line) and human cells and cell lines.

[0115] In a preferred embodiment, the CA proteins are expressed in mammalian cells. Mammalian expression systems are also known in the art, and include retroviral systems. A preferred expression vector system is a retroviral vector system such as is generally described in PCT/US97/01019 and PCT/US97/01048, both of which are hereby expressly incorporated by reference. Of particular use as mammalian promoters are the promoters from mammalian viral genes, since the viral genes are often highly expressed and have a broad host range. Examples include the SV40 early promoter, mouse mammary tumor virus LTR promoter, adenovirus major late promoter, herpes simplex virus promoter, and the CMV promoter. Typically, transcription termination and polyadenylation sequences recognized by mammalian cells are regulatory regions located 3′ to the translation stop codon and thus, together with the promoter elements, flank the coding sequence. Examples of transcription terminator and polyadenylation signals include those derived form SV40.

[0116] The methods of introducing exogenous nucleic acid into mammalian hosts, as well as other hosts, are well known in the art, and will vary with the host cell used. Techniques include dextran-mediated transfection, calcium phosphate precipitation, polybrene mediated transfection, protoplast fusion, electroporation, viral infection, encapsulation of the polynucleotide(s) in liposomes, and direct microinjection of the DNA into nuclei.

[0117] In a preferred embodiment, CA proteins are expressed in bacterial systems. Bacterial expression systems are well known in the art. Promoters from bacteriophage may also be used and are known in the art. In addition, synthetic promoters and hybrid promoters are also useful; for example, the tac promoter is a hybrid of the trp and lac promoter sequences. Furthermore, a bacterial promoter can include naturally occurring promoters of non-bacterial origin that have the ability to bind bacterial RNA polymerase and initiate transcription. In addition to a functioning promoter sequence, an efficient ribosome binding site is desirable. The expression vector may also include a signal peptide sequence that provides for secretion of the CA protein in bacteria. The protein is either secreted into the growth media (gram-positive bacteria) or into the periplasmic space, located between the inner and outer membrane of the cell (gram-negative bacteria). The bacterial expression vector may also include a selectable marker gene to allow for the selection of bacterial strains that have been transformed. Suitable selection genes include genes that render the bacteria resistant to drugs such as ampicillin, chloramphenicol, erythromycin, kanamycin, neomycin and tetracycline. Selectable markers also include biosynthetic genes, such as those in the histidine, tryptophan and leucine biosynthetic pathways. These components are assembled into expression vectors. Expression vectors for bacteria are well known in the art, and include vectors for Bacillus subtilis, E. coli, Streptococcus cremoris, and Streptococcus lividans, among others. The bacterial expression vectors are transformed into bacterial host cells using techniques well known in the art, such as calcium chloride treatment, electroporation, and others.

[0118] In one embodiment, CA proteins are produced in insect cells. Expression vectors for the transformation of insect cells, and in particular, baculovirus-based expression vectors, are well known in the art.

[0119] In a preferred embodiment, CA protein is produced in yeast cells. Yeast expression systems are well known in the art, and include expression vectors for Saccharomyces cerevisiae, Candida albicans and C. maltosa, Hansenula polymorpha, Kluyveromyces fragilis and K. lactis, Pichia guillerimondii and P. pastoris, Schizosaccharomyces pombe, and Yarrowia lipolytica.

[0120] The CA protein may also be made as a fusion protein, using techniques well known in the art. Thus, for example, for the creation of monoclonal antibodies. If the desired epitope is small, the CA protein may be fused to a carrier protein to form an immunogen. Alternatively, the CA protein may be made as a fusion protein to increase expression, or for other reasons. For example, when the CA protein is a CA peptide, the nucleic acid encoding the peptide may be linked to other nucleic acid for expression purposes.

[0121] In one embodiment, the CA nucleic acids, proteins and antibodies of the invention are labeled. By “labeled” herein is meant that a compound has at least one element, isotope or chemical compound attached to enable the detection of the compound. In general, labels fall into three classes: a) isotopic labels, which may be radioactive or heavy isotopes; b) immune labels, which may be antibodies or antigens; and c) colored or fluorescent dyes. The labels may be incorporated into the CA nucleic acids, proteins and antibodies at any position. For example, the label should be capable of producing, either directly or indirectly, a detectable signal. The detectable moiety may be a radioisotope, such as ³H, ¹⁴C, ³²P, ³⁵S, or ¹²⁵I, a fluorescent or chemiluminescent compound, such as fluorescein isothiocyanate, rhodamine, or luciferin, or an enzyme, such as alkaline phosphatase, beta-galactosidase or horseradish peroxidase. Any method known in the art for conjugating the antibody to the label may be employed, including those methods described by Hunter et al., Nature, 144:945 (1962); David et al., Biochemistry, 13:1014 (1974); Pain et al., J. Immunol. Meth., 40:219 (1981); and Nygren, J. Histochem. and Cytochem., 30:407 (1982).

[0122] Accordingly, the present invention also provides CA protein sequences. A CA protein of the present invention may be identified in several ways. “Protein” in this sense includes proteins, polypeptides, and peptides. As will be appreciated by those in the art, the nucleic acid sequences of the invention can be used to generate protein sequences. There are a variety of ways to do this, including cloning the entire gene and verifying its frame and amino acid sequence, or by comparing it to known sequences to search for homology to provide a frame, assuming the CA protein has homology to some protein in the database being used. Generally, the nucleic acid sequences are input into a program that will search all three frames for homology. This is done in a preferred embodiment using the following NCBI Advanced BLAST parameters. The program is blastx or blastn. The database is nr. The input data is as “Sequence in FASTA format”. The organism list is “none”. The “expect” is 10; the filter is default. The “descriptions” is 500, the “alignments” is 500, and the “alignment view” is pairwise. The “query Genetic Codes” is standard (1). The matrix is BLOSUM 62; gap existence cost is 11, per residue gap cost is 1; and the lambda ratio is 0.85 default. This results in the generation of a putative protein sequence.

[0123] In general, the term “polypeptide” as used herein refers to both the full-length polypeptide encoded by the recited polynucleotide, the polypeptide encoded by the gene represented by the recited polynucleotide, as well as portions or fragments thereof. The present invention encompasses variants of the naturally occurring proteins, wherein such variants are homologous or substantially similar to the naturally occurring protein, and can be of an origin of the same or different species as the naturally occurring protein (e.g., human, murine, or some other species that naturally expresses the recited polypeptide, usually a mammalian species). In general, variant polypeptides have a sequence that has at least about 80%, at least about 81%, at least about 82%, at least about 83%, at least about 84%, at least about 85%, at least about 86%, at least about 87%, at least about 88%, at least about 89%, usually at least about 90%, at least 91%, at least 92%, at least 93%, at least 94%, at least 95%, at least 96%, at least 97%, at least 98% and more usually at least about 99% sequence identity with a differentially expressed polypeptide described herein, as determined by the Smith-Waterman homology search algorithm using an affine gap search with a gap open penalty of 12 and a gap extension penalty of 2, BLOSUM matrix of 62. The Smith-Waterman homology search algorithm is taught in Smith and Waterman, Adv. Appl. Math. (1981) 2: 482-489. The variant polypeptides can be naturally or non-naturally glycosylated, i.e., the polypeptide has a glycosylation pattern that differs from the glycosylation pattern found in the corresponding naturally occurring protein.

[0124] Also within the scope of the invention are variants. Variants of polypeptides include mutants, fragments, and fusions. Mutants can include amino acid substitutions, additions or deletions. The amino acid substitutions can be conservative amino acid substitutions or substitutions to eliminate non-essential amino acids, such as to alter a glycosylation site, a phosphorylation site or an acetylation site, or to minimize misfolding by substitution or deletion of one or more cysteine residues that are not necessary for function. Conservative amino acid substitutions are those that preserve the general charge, hydrophobicity/hydrophilicity, and/or steric bulk of the amino acid substituted. Variants can be designed so as to retain or have enhanced biological activity of a particular region of the protein (e.g., a functional domain and/or, where the polypeptide is a member of a protein family, a region associated with a consensus sequence). Selection of amino acid alterations for production of variants can be based upon the accessibility (interior vs. exterior) of the amino acid (see, e.g., Go et al, Int. J. Peptide Protein Res. (1980) 15:211), the thermostability of the variant polypeptide (see, e.g., Querol et al., Prot. Eng. (1996) 9:265), desired glycosylation sites (see, e.g., Olsen and Thomsen, J. Gen. Microbiol. (1991) 137:579), desired disulfide bridges (see, e.g., Clarke et al., Biochemistry (1993) 32:4322; and Wakarchuk et al., Protein Eng. (1994) 7:1379), desired metal binding sites (see, e.g., Toma et al., Biochemistry (1991) 30:97, and Haezerbrouck et al., Protein Eng. (1993) 6:643), and desired substitutions within proline loops (see, e.g., Masul et al., Appl. Env. Microbiol. (1994) 60:3579). Cysteine-depleted muteins can be produced as disclosed in U.S. Pat. No. 4,959,314.

[0125] Variants also include fragments of the polypeptides disclosed herein, particularly biologically active fragments and/or fragments corresponding to functional domains. Fragments of interest will typically be at least about 8 amino acids (aa) 10 aa, 15 aa, 20 aa, 25 aa, 30 aa, 35 aa, 40 aa, to at least about 45 aa in length, usually at least about 50 aa in length, at least about 75 aa, at least about 100 aa, at least about 125 aa, at least about 150 aa in length, at least about 200 aa, at least about 300 aa, at least about 400 aa and can be as long as 500 aa in length or longer, but will usually not exceed about 1000 aa in length, where the fragment will have a stretch of amino acids that is identical to a polypeptide encoded by a polynucleotide having a sequence of any one of the polynucleotide sequences provided herein, or a homolog thereof. The protein variants described herein are encoded by polynucleotides that are within the scope of the invention. The genetic code can be used to select the appropriate codons to construct the corresponding variants.

[0126] While altered expression of the polynucleotides associated with cancer is observed, altered levels of expression of the polypeptides encoded by these polynucleotides may likely play a role in cancers.

[0127] Also included within one embodiment of CA proteins are amino acid variants of the naturally occurring sequences, as determined herein. Preferably, the variants are preferably greater than about 75% homologous to the wild-type sequence, more preferably greater than about 80%, even more preferably greater than about 85% and most preferably greater than 90%. The present application is also directed to proteins containing polypeptides at least 80%, 85%, 90%, 95%, 96%, 97%, 98% or 99% identical to a CA polypeptide sequence set forth herein. As for nucleic acids, homology in this context means sequence similarity or identity, with identity being preferred. This homology will be determined using standard techniques known in the art as are outlined above for the nucleic acid homologies.

[0128] CA proteins of the present invention may be shorter or longer than the wild type amino acid sequences. Thus, in a preferred embodiment, included within the definition of CA proteins are portions or fragments of the wild type sequences herein. In addition, as outlined above, the CA nucleic acids of the invention may be used to obtain additional coding regions, and thus additional protein sequence, using techniques known in the art.

[0129] In a preferred embodiment, the CA proteins are derivative or variant CA proteins as compared to the wild-type sequence. That is, as outlined more fully below, the derivative CA peptide will contain at least one amino acid substitution, deletion or insertion, with amino acid substitutions being particularly preferred. The amino acid substitution, insertion or deletion may occur at any residue within the CA peptide.

[0130] Also included in an embodiment of CA proteins of the present invention are amino acid sequence variants. These variants fall into one or more of three classes: substitutional, insertional or deletional variants. These variants ordinarily are prepared by site-specific mutagenesis of nucleotides in the DNA encoding the CA protein, using cassette or PCR mutagenesis or other techniques well known in the art, to produce DNA encoding the variant, and thereafter expressing the DNA in recombinant cell culture as outlined above. However, variant CA protein fragments having up to about 100-150 residues may be prepared by in vitro synthesis using established techniques. Amino acid sequence variants are characterized by the predetermined nature of the variation, a feature that sets them apart from naturally occurring allelic or interspecies variation of the CA protein amino acid sequence. The variants typically exhibit the same qualitative biological activity as the naturally occurring analogue, although variants can also be selected which have modified characteristics as will be more fully outlined below.

[0131] While the site or region for introducing an amino acid sequence variation is predetermined, the mutation per se need not be predetermined. For example, in order to optimize the performance of a mutation at a given site, random mutagenesis may be conducted at the target codon or region and the expressed CA variants screened for the optimal combination of desired activity. Techniques for making substitution mutations at predetermined sites in DNA having a known sequence are well known, for example, M13 primer mutagenesis and LAR mutagenesis. Screening of the mutants is done using assays of CA protein activities.

[0132] Amino acid substitutions are typically of single residues; insertions usually will be on the order of from about 1 to 20 amino acids, although considerably larger insertions may be tolerated. Deletions range from about 1 to about 20 residues, although in some cases deletions may be much larger.

[0133] Substitutions, deletions, insertions or any combination thereof may be used to arrive at a final derivative. Generally these changes are done on a few amino acids to minimize the alteration of the molecule. However, larger changes may be tolerated in certain circumstances. When small alterations in the characteristics of the CA protein are desired, substitutions are generally made in accordance with the following chart:

CHART 1

| | |
|---|---|
| Original Residue | Exemplary Substitutions |

| | |
|---|---|
| Ala | Ser |
| Arg | Lys |
| Asn | Gln, His |
| Asp | Glu |
| Cys | Ser |
| Gln | Asn |
| Glu | Asp |
| Gly | Pro |
| His | Asn, Gln |
| Ile | Leu, Val |
| Leu | Ile, Val |
| Lys | Arg, Gln, Glu |
| Met | Leu, Ile |
| Phe | Met, Leu, Tyr |
| Ser | Thr |
| Thr | Ser |
| Trp | Tyr |
| Tyr | Trp, Phe |
| Val | Ile, Leu |

[0134] Substantial changes in function or immunological identity are made by selecting substitutions that are less conservative than those shown in Chart I. For example, substitutions may be made full length to more significantly affect one or more of the following: the structure of the polypeptide backbone in the area of the alteration (e.g., the alpha-helical or beta-sheet structure); the charge or hydrophobicity of the molecule at the target site; and the bulk of the side chain. The substitutions which in general are expected to produce the greatest changes in the polypeptide's properties are those in which (a) a hydrophilic residue, e.g. seryl or threonyl is substituted for (or by) a hydrophobic residue, e.g. leucyl, isoleucyl, phenylalanyl, valyl or alanyl; (b) a cysteine or proline is substituted for (or by) any other residue; (c) a residue having an electropositive side chain, e.g. lysyl, arginyl, or histidyl, is substituted for (or by) an electronegative residue, e.g. glutamyl or aspartyl; or (d) a residue having a bulky side chain, e.g. phenylalanine, is substituted for (or by) one not having a side chain, e.g. glycine.

[0135] The variants typically exhibit the same qualitative biological activity and will elicit the same immune response as the naturally-occurring analogue, although variants also are selected to modify the characteristics of the CA proteins as needed. Alternatively, the variant may be designed such that the biological activity of the CA protein is altered. For example, glycosylation sites may be altered or removed, dominant negative mutations created, etc.

[0136] Covalent modifications of CA polypeptides are included within the scope of this invention, for example for use in screening. One type of covalent modification includes reacting targeted amino acid residues of a CA polypeptide with an organic derivatizing agent that is capable of reacting with selected side chains or the N- or C-terminal residues of a CA polypeptide. Derivatization with bifunctional agents is useful, for instance, for crosslinking CA polypeptides to a water-insoluble support matrix or surface for use in the method for purifying anti-CA antibodies or screening assays, as is more fully described below. Commonly used crosslinking agents include, e.g., 1,1-bis(diazoacetyl)-2-phenylethane, glutaraldehyde, N-hydroxysuccinimide esters, for example, esters with 4-azidosalicylic acid, homobifunctional imidoesters, including disuccinimidyl esters such as 3,3′-dithiobis(succinimidylpropionate), bifunctional maleimides such as bis-N-maleimido-1,8-octane and agents such as methyl-3-[(p-azidophenyl)dithio]propioimidate.

[0137] Other modifications include deamidation of glutaminyl and asparaginyl residues to the corresponding glutamyl and aspartyl residues, respectively, hydroxylation of proline and lysine, phosphorylation of hydroxyl groups of seryl, threonyl or tyrosyl residues, methylation of the a-amino groups of lysine, arginine, and histidine side chains [T. E. Creighton, Proteins: Structure and Molecular Properties, W.H. Freeman & Co., San Francisco, pp. 79-86 (1983)], acetylation of the N-terminal amine, and amidation of any C-terminal carboxyl group.

[0138] Another type of covalent modification of the CA polypeptide included within the scope of this invention comprises altering the native glycosylation pattern of the polypeptide. “Altering the native glycosylation pattern” is intended for purposes herein to mean deleting one or more carbohydrate moieties found in native sequence CA polypeptide, and/or adding one or more glycosylation sites that are not present in the native sequence CA polypeptide.

[0139] Addition of glycosylation sites to CA polypeptides may be accomplished by altering the amino acid sequence thereof. The alteration may be made, for example, by the addition of, or substitution by, one or more serine or threonine residues to the native sequence CA polypeptide (for O-linked glycosylation sites). The CA amino acid sequence may optionally be altered through changes at the DNA level, particularly by mutating the DNA encoding the CA polypeptide at preselected bases such that codons are generated that will translate into the desired amino acids.

[0140] Another means of increasing the number of carbohydrate moieties on the CA polypeptide is by chemical or enzymatic coupling of glycosides to the polypeptide. Such methods are described in the art, e.g., in WO 87/05330 published 11 Sep. 1987, and in Aplin and Wriston, L A Crit. Rev. Biochem., pp. 259-306 (1981).

[0141] Removal of carbohydrate moieties present on the CA polypeptide may be accomplished chemically or enzymatically or by mutational substitution of codons encoding for amino acid residues that serve as targets for glycosylation. Chemical deglycosylation techniques are known in the art and described, for instance, by Hakimuddin, et al., Arch. Biochem. Biophys., 259:52 (1987) and by Edge et al., Anal. Biochem., 118:131 (1981). Enzymatic cleavage of carbohydrate moieties on polypeptides can be achieved by the use of a variety of endo- and exo-glycosidases as described by Thotakura et al., Meth. Enzymol., 138:350 (1987).

[0142] Another type of covalent modification of CA comprises linking the CA polypeptide to one of a variety of nonproteinaceous polymers, e.g., polyethylene glycol, polypropylene glycol, or polyoxyalkylenes, in the manner set forth in U.S. Pat. No. 4,640,835; 4,496,689; 4,301,144; 4,670,417; 4,791,192 or 4,179,337.

[0143] CA polypeptides of the present invention may also be modified in a way to form chimeric molecules comprising a CA polypeptide fused to another, heterologous polypeptide or amino acid sequence. In one embodiment, such a chimeric molecule comprises a fusion of a CA polypeptide with a tag polypeptide that provides an epitope to which an anti-tag antibody can selectively bind. The epitope tag is generally placed at the amino- or carboxyl-terminus of the CA polypeptide, although internal fusions may also be tolerated in some instances. The presence of such epitope-tagged forms of a CA polypeptide can be detected using an antibody against the tag polypeptide. Also, provision of the epitope tag enables the CA polypeptide to be readily purified by affinity purification using an anti-tag antibody or another type of affinity matrix that binds to the epitope tag. In an alternative embodiment, the chimeric molecule may comprise a fusion of a CA polypeptide with an immunoglobulin or a particular region of an immunoglobulin. For a bivalent form of the chimeric molecule, such a fusion could be to the Fc region of an IgG molecule.

[0144] Various tag polypeptides and their respective antibodies are well known in the art. Examples include poly-histidine (poly-his) or poly-histidine-glycine (poly-his-gly) tags; the flu HA tag polypeptide and its antibody 12CA5 [Field et al., Mol. Cell. Biol., 8:2159-2165 (1988)]; the c-myc tag and the 8F9, 3C7, 6E10, G4, B7 and 9E10 antibodies thereto [Evan et al., Molecular and Cellular Biology, 5:3610-3616 (1985)]; and the Herpes Simplex virus glycoprotein D (gD) tag and its antibody [Paborsky et al., Protein Engineering, 3(6):547-553 (1990)]. Other tag polypeptides include the Flag-peptide [Hopp et al., BioTechnology, 6:1204-1210 (1988)]; the KT3 epitope peptide [Martin et al., Science, 255:192-194 (1992)]; tubulin epitope peptide [Skinner et al., J. Biol. Chem., 266:15163-15166 (1991)]; and the T7 gene 10 protein peptide tag [Lutz-Freyernuth et al., Proc. Natl. Acad. Sci. USA, 87:6393-6397 (1990)].

[0145] Also included with the definition of CA protein in one embodiment are other CA proteins of the CA family, and CA proteins from other organisms, which are cloned and expressed as outlined below. Thus, probe or degenerate polymerase chain reaction (PCR) primer sequences may be used to find other related CA proteins from humans or other organisms. As will be appreciated by those in the art, particularly useful probe and/or PCR primer sequences include the unique areas of the CA nucleic acid sequence. As is generally known in the art, preferred PCR primers are from about 15 to about 35 nucleotides in length, with from about 20 to about 30 being preferred, and may contain inosine as needed. The conditions for the PCR reaction are well known in the art.

[0146] In addition, as is outlined herein, CA proteins can be made that are longer than those encoded by the nucleic acids of the figures, for example, by the elucidation of additional sequences, the addition of epitope or purification tags, the addition of other fusion sequences, etc.

[0147] CA proteins may also be identified as being encoded by CA nucleic acids. Thus, CA proteins are encoded by nucleic acids that will hybridize to the sequences of the sequence listings, or their complements, as outlined herein.

### CA Antigens and Antibodies Thereto

[0148] In one embodiment, the invention provides CA specific antibodies. In a preferred embodiment, when the CA protein is to be used to generate antibodies, for example for immunotherapy, the CA protein should share at least one epitope or determinant with the full-length protein. By “epitope” or “determinant” herein is meant a portion of a protein that will generate and/or bind an antibody or T-cell receptor in the context of MHC. Thus, in most instances, antibodies made to a smaller CA protein will be able to bind to the full-length protein. In a preferred embodiment, the epitope is unique; that is, antibodies generated to a unique epitope show little or no cross-reactivity.

[0149] Any polypeptide sequence encoded by the CA polynucleotide sequences may be analyzed to determine certain preferred regions of the polypeptide. Regions of high antigenicity are determined from data by DNASTAR analysis by choosing values that represent regions of the polypeptide that are likely to be exposed on the surface of the polypeptide in an environment in which antigen recognition may occur in the process of initiation of an immune response. For example, the amino acid sequence of a polypeptide encoded by a CA polynucleotide sequence may be analyzed using the default parameters of the DNASTAR computer algorithm (DNASTAR, Inc., Madison, Wis.; http://www.dnastar.com/).

[0150] Polypeptide features that may be routinely obtained using the DNASTAR computer algorithm include, but are not limited to, Garnier-Robson alpha-regions, beta-regions, turn-regions, and coil-regions (Garnier et al. J. Mol. Biol., 120: 97 (1978)); Chou-Fasman alpha-regions, beta-regions, and turn-regions (Adv. in Enzymol., 47:45-148 (1978)); Kyte-Doolittle hydrophilic regions and hydrophobic regions (J. Mol. Biol., 157:105-132 (1982)); Eisenberg alpha- and beta-amphipathic regions; Karplus-Schulz flexible regions; Emini surface-forming regions (J. Virol., 55(3):836-839 (1985)); and Jameson-Wolf regions of high antigenic index (CABIOS, 4(1):181-186 (1988)). Kyte-Doolittle hydrophilic regions and hydrophobic regions, Emini surface-forming regions, and Jameson-Wolf regions of high antigenic index (i.e., containing four or more contiguous amino acids having an antigenic index of greater than or equal to 1.5, as identified using the default parameters of the Jameson-Wolf program) can routinely be used to determine polypeptide regions that exhibit a high degree of potential for antigenicity. One approach for preparing antibodies to a protein is the selection and preparation of an amino acid sequence of all or part of the protein, chemically synthesizing the sequence and injecting it into an appropriate animal, typically a rabbit, hamster or a mouse. Oligopeptides can be selected as candidates for the production of an antibody to the CA protein based upon the oligopeptides lying in hydrophilic regions, which are thus likely to be exposed in the mature protein. Additional oligopeptides can be determined using, for example, the Antigenicity Index, Welling, G. W. et al., FEBS Lett. 188:215-218 (1985), incorporated herein by reference.

[0151] In one embodiment, the term “antibody” includes antibody fragments, as are known in the art, including Fab, Fab₂, single chain antibodies (Fv for example), chimeric antibodies, etc., either produced by the modification of whole antibodies or those synthesized de novo using recombinant DNA technologies.

[0152] Methods of preparing polyclonal antibodies are known to the skilled artisan. Polyclonal antibodies can be raised in a mammal, for example, by one or more injections of an immunizing agent and, if desired, an adjuvant. Typically, the immunizing agent and/or adjuvant will be injected in the mammal by multiple subcutaneous or intraperitoneal injections. The immunizing agent may include a protein encoded by a nucleic acid of the figures or fragment thereof or a fusion protein thereof. It may be useful to conjugate the immunizing agent to a protein known to be immunogenic in the mammal being immunized. Examples of such immunogenic proteins include but are not limited to keyhole limpet hemocyanin, serum albumin, bovine thyroglobulin, and soybean trypsin inhibitor. Examples of adjuvants that may be employed include Freund's complete adjuvant and MPL-TDM adjuvant (monophosphoryl Lipid A, synthetic trehalose dicorynomycolate). The immunization protocol may be selected by one skilled in the art without undue experimentation.

[0153] The antibodies may, alternatively, be monoclonal antibodies. Monoclonal antibodies may be prepared using hybridoma methods, such as those described by Kohler and Milstein, Nature, 256:495 (1975). In a hybridoma method, a mouse, hamster, or other appropriate host animal, is typically immunized with an immunizing agent to elicit lymphocytes that produce or are capable of producing antibodies that will specifically bind to the immunizing agent. Alternatively, the lymphocytes may be immunized in vitro. The immunizing agent will typically include a polypeptide encoded by a nucleic acid of Tables 1-21, or fragment thereof or a fusion protein thereof. Generally, either peripheral blood lymphocytes (“PBLs”) are used if cells of human origin are desired, or spleen cells or lymph node cells are used if non-human mammalian sources are desired. The lymphocytes are then fused with an immortalized cell line using a suitable fusing agent, such as polyethylene glycol, to form a hybridoma cell (Goding, Monoclonal Antibodies: Principles and Practice, Academic Press, (1986) pp. 59-103). Immortalized cell lines are usually transformed mammalian cells, particularly myeloma cells of rodent, bovine and human origin. Usually, rat or mouse myeloma cell lines are employed. The hybridoma cells may be cultured in a suitable culture medium that preferably contains one or more substances that inhibit the growth or survival of the unfused, immortalized cells. For example, if the parental cells lack the enzyme hypoxanthine guanine phosphoribosyl transferase (HGPRT or HPRT), the culture medium for the hybridomas typically will include hypoxanthine, aminopterin, and thymidine (“HAT medium”), which substances prevent the growth of HGPRT-deficient cells.

[0154] Monoclonal antibody technology is used in implementing research, diagnosis and therapy. Monoclonal antibodies are used in radioimmunoassays, enzyme-linked immunosorbent assays, immunocytopathology, and flow cytometry for in vitro diagnosis, and in vivo for diagnosis and immunotherapy of human disease. Waldmann, T. A. (1991) Science 252:1657-1662. In particular, monoclonal antibodies have been widely applied to the diagnosis and therapy of cancer, wherein it is desirable to target malignant lesions while avoiding normal tissue. See, e.g., U.S. Pat. Nos. 4,753,894 to Frankel, et al.; 4,938,948 to Ring et al.; and 4,956,453 to Bjorn et al.

[0155] In one embodiment, the antibodies are bispecific antibodies. Bispecific antibodies are monoclonal, preferably human or humanized, antibodies that have binding specificities for at least two different antigens. A number of “humanized” antibody molecules comprising an antigen-binding site derived from a non-human immunoglobulin have been described, including chimeric antibodies having rodent V regions and their associated CDRs fused to human constant domains (Winter et al. (1991) Nature 349:293-299; Lobuglio et al. (1989) Proc. Nat. Acad. Sci. USA 86:4220-4224; Shaw et al. (1987) J Immunol. 138:4534-4538; and Brown et al. (1987) Cancer Res. 47:3577-3583), rodent CDRs grafted into a human supporting FR prior to fusion with an appropriate human antibody constant domain (Riechmann et al. (1988) Nature 332:323-327; Verhoeyen et al. (1988) Science 239:1534-1536; and Jones et al. (1986) Nature 321:522-525), and rodent CDRs supported by recombinantly veneered rodent FRs (European Patent Publication No. 519,596, published Dec. 23, 1992). These “humanized” molecules are designed to minimize unwanted immunological response toward rodent antihuman antibody molecules which limits the duration and effectiveness of therapeutic applications of those moieties in human recipients. In the present case, one of the binding specificities is for a protein encoded by a nucleic acid of Tables 1-21, or a fragment thereof, the other one is for any other antigen, and preferably for a cell-surface protein or receptor or receptor subunit, preferably one that is tumor specific.

[0156] In a preferred embodiment, the antibodies to CA are capable of reducing or eliminating the biological function of CA, as is described below. That is, the addition of anti-CA antibodies (either polyclonal or preferably monoclonal) to CA (or cells containing CA) may reduce or eliminate the CA activity. Generally, at least a 25% decrease in activity is preferred, with at least about 50% being particularly preferred and about a 95-100% decrease being especially preferred.

[0157] In a preferred embodiment the antibodies to the CA proteins are humanized antibodies. “Humanized” antibodies refer to a molecule having an antigen binding site that is substantially derived from an immunoglobulin from a non-human species and the remaining immunoglobulin structure of the molecule based upon the structure and/or sequence of a human immunoglobulin. The antigen binding site may comprise either complete variable domains fused onto constant domains or only the complementarity determining regions (CDRs) grafted onto appropriate framework regions in the variable domains. Antigen binding sites may be wild type or modified by one or more amino acid substitutions, e.g., modified to resemble human immunoglobulin more closely. Alternatively, a humanized antibody may be derived from a chimeric antibody that retains or substantially retains the antigen-binding properties of the parental, non-human, antibody but which exhibits diminished immunogenicity as compared to the parental antibody when administered to humans. The phrase “chimeric antibody,” as used herein, refers to an antibody containing sequence derived from two different antibodies (see, e.g., U.S. Pat. No. 4,816,567) that typically originate from different species. Typically, in these chimeric antibodies, the variable region of both light and heavy chains mimics the variable regions of antibodies derived from one species of mammals, while the constant portions are homologous to the sequences in antibodies derived from another. Most typically, chimeric antibodies comprise human and murine antibody fragments, generally human constant and mouse variable regions. Humanized antibodies include human immunoglobulins (recipient antibody) in which residues form a complementary determining region (CDR) of the recipient are replaced by residues from a CDR of a non-human species (donor antibody) such as mouse, rat or rabbit having the desired specificity, affinity and capacity. In some instances, Fv framework residues of the human immunoglobulin are replaced by corresponding non-human residues. Humanized antibodies may also comprise residues that are found neither in the recipient antibody nor in the imported CDR or framework sequences. In general, the humanized antibody will comprise substantially all of at least one, and typically two, variable domains, in which all or substantially all of the CDR regions correspond to those of a non-human immunoglobulin and all or substantially all of the framework residues (FR) regions are those of a human immunoglobulin consensus sequence. The humanized antibody optimally also will comprise at least a portion of an immunoglobulin constant region (Fc), typically that of a human immunoglobulin (Jones et al., Nature, 321:522-525 (1986); Riechmann et al., Nature, 332:323-329 (1988); and Presta, Curr. Op. Struct. Biol., 2:593-596 (1992)). One clear advantage to such chimeric forms is that, for example, the variable regions can conveniently be derived from presently known sources using readily available hybridomas or B cells from non human host organisms in combination with constant regions derived from, for example, human cell preparations. While the variable region has the advantage of ease of preparation, and the specificity is not affected by its source, the constant region being human, is less likely to elicit an immune response from a human subject when the antibodies are injected than would the constant region from a non-human source. However, the definition is not limited to this particular example.

[0158] Because humanized antibodies are far less immunogenic in humans than the parental mouse monoclonal antibodies, they can be used for the treatment of humans with far less risk of anaphylaxis. Thus, these antibodies may be preferred in therapeutic applications that involve in vivo administration to a human such as, e.g., use as radiation sensitizers for the treatment of neoplastic disease or use in methods to reduce the side effects of, e.g., cancer therapy. Methods for humanizing non-human antibodies are well known in the art. Generally, a humanized antibody has one or more amino acid residues introduced into it from a source that is non-human. These non-human amino acid residues are often referred to as import residues, which are typically taken from an import variable domain. Humanization can be essentially performed following the method of Winter and co-workers (Jones et al., Nature 321:522-525 (1986); Riechmann et al., Nature 332:323-327 (1988); Verhoeyen et al., Science 239:1534-1536 (1988)), by substituting rodent CDRs or CDR sequences for the corresponding sequences of a human antibody. Accordingly, such humanized antibodies are chimeric antibodies (U.S. Pat. No. 4,816,567), wherein substantially less than an intact human variable domain has been substituted by the corresponding sequence from a non-human species. In practice, humanized antibodies are typically human antibodies in which some CDR residues and possibly some FR residues are substituted by residues from analogous sites in rodent antibodies.

[0159] Human antibodies can also be produced using various techniques known in the art, including phage display libraries [Hoogenboom and Winter, J. Mol. Biol., 227:381 (1991); Marks et al., J. Mol. Biol., 222:581 (1991)]. The techniques of Cole et al. and Boerner et al. are also available for the preparation of human monoclonal antibodies [Cole et al., Monoclonal Antibodies and Cancer Therapy, Alan R. Liss, p. 77 (1985) and Boerner et al., J. Immunol., 147(1):86-95 (1991)]. Humanized antibodies may be achieved by a variety of methods including, for example: (1) grafting the non-human complementarity determining regions (CDRs) onto a human framework and constant region (a process referred to in the art as “humanizing”), or, alternatively, (2) transplanting the entire non-human variable domains, but “cloaking” them with a human-like surface by replacement of surface residues (a process referred to in the art as “veneering”). In the present invention, humanized antibodies will include both “humanized” and “veneered” antibodies. Similarly, human antibodies can be made by introducing human immunoglobulin loci into transgenic animals, e.g., mice in which the endogenous immunoglobulin genes have been partially or completely inactivated. Upon challenge, human antibody production is observed, which closely resembles that seen in humans in all respects, including gene rearrangement, assembly, and antibody repertoire. This approach is described, for example, in U.S. Pat. Nos. 5,545,807; 5,545,806; 5,569,825; 5,625,126; 5,633,425; 5,661,016, and in the following scientific publications: Marks et al., Bio/Technology 10, 779-783 (1992); Lonberg et al., Nature 368 856-859 (1994); Morrison, Nature 368, 812-13 (1994); Fishwild et al., Nature Biotechnology 14, 845-51 (1996); Neuberger, Nature Biotechnology 14, 826 (1996); Lonberg and Huszar, Intern. Rev. Immunol. 13 65-93 (1995); Jones et al., Nature 321:522-525 (1986); Morrison et al., Proc. Natl. Acad. Sci, U.S.A., 81:6851-6855 (1984); Morrison and Oi, Adv. Immunol., 44:65-92 (1988); Verhoeyer et al., Science 239:1534-1536 (1988); Padlan, Molec. Immun. 28:489-498 (1991); Padlan, Molec. Immunol. 31(3):169-217 (1994); and Kettleborough, C. A. et al., Protein Eng. 4(7):773-83 (1991) each of which is incorporated herein by reference.

[0160] The phrase “complementarity determining region” refers to amino acid sequences which together define the binding affinity and specificity of the natural Fv region of a native immunoglobulin binding site. See, e.g., Chothia et al., J. Mol. Biol. 196:901-917 (1987); Kabat et al., U.S. Dept. of Health and Human Services NIH Publication No. 91-3242 (1991). The phrase “constant region” refers to the portion of the antibody molecule that confers effector functions. In the present invention, mouse constant regions are substituted by human constant regions. The constant regions of the subject humanized antibodies are derived from human immunoglobulins. The heavy chain constant region can be selected from any of the five isotypes: alpha, delta, epsilon, gamma or mu. One method of humanizing antibodies comprises aligning the non-human heavy and light chain sequences to human heavy and light chain sequences, selecting and replacing the non-human framework with a human framework based on such alignment, molecular modeling to predict the conformation of the humanized sequence and comparing to the conformation of the parent antibody. This process is followed by repeated back mutation of residues in the CDR region that disturb the structure of the CDRs until the predicted conformation of the humanized sequence model closely approximates the conformation of the non-human CDRs of the parent non-human antibody. Such humanized antibodies may be further derivatized to facilitate uptake and clearance, e.g, via Ashwell receptors. See, e.g., U.S. Pat. Nos. 5,530,101 and 5,585,089 which are incorporated herein by reference.

[0161] Humanized antibodies to CA polypeptides can also be produced using transgenic animals that are engineered to contain human immunoglobulin loci. For example, WO 98/24893 discloses transgenic animals having a human Ig locus wherein the animals do not produce functional endogenous immunoglobulins due to the inactivation of endogenous heavy and light chain loci. WO 91/10741 also discloses transgenic non-primate mammalian hosts capable of mounting an immune response to an immunogen, wherein the antibodies have primate constant and/or variable regions, and wherein the endogenous immunoglobulin-encoding loci are substituted or inactivated. WO 96/30498 discloses the use of the Cre/Lox system to modify the immunoglobulin locus in a mammal, such as to replace all or a portion of the constant or variable region to form a modified antibody molecule. WO 94/02602 discloses non-human mammalian hosts having inactivated endogenous Ig loci and functional human Ig loci. U.S. Pat. No. 5,939,598 discloses methods of making transgenic mice in which the mice lack endogenous heavy chains, and express an exogenous immunoglobulin locus comprising one or more xenogeneic constant regions.

[0162] Using a transgenic animal described above, an immune response can be produced to a selected antigenic molecule, and antibody-producing cells can be removed from the animal and used to produce hybridomas that secrete human monoclonal antibodies. Immunization protocols, adjuvants, and the like are known in the art, and are used in immunization of, for example, a transgenic mouse as described in WO 96/33735. The monoclonal antibodies can be tested for the ability to inhibit or neutralize the biological activity or physiological effect of the corresponding protein.

[0163] In the present invention, CA polypeptides of the invention and variants thereof are used to immunize a transgenic animal as described above. Monoclonal antibodies are made using methods known in the art, and the specificity of the antibodies is tested using isolated CA polypeptides. Methods for preparation of the human or primate CA or an epitope thereof include, but are not limited to chemical synthesis, recombinant DNA techniques or isolation from biological samples. Chemical synthesis of a peptide can be performed, for example, by the classical Merrifeld method of solid phase peptide synthesis (Merrifeld, J. Am. Chem. Soc. 85:2149, 1963 which is incorporated by reference) or the FMOC strategy on a Rapid Automated Multiple Peptide Synthesis system (E. I. du Pont de Nemours Company, Wilmington, Del.) (Caprino and Han, J. Org. Chem. 37:3404, 1972 which is incorporated by reference).

[0164] Polyclonal antibodies can be prepared by immunizing rabbits or other animals by injecting antigen followed by subsequent boosts at appropriate intervals. The animals are bled and sera assayed against purified CA proteins usually by ELISA or by bioassay based upon the ability to block the action of CA proteins. When using avian species, e.g., chicken, turkey and the like, the antibody can be isolated from the yolk of the egg. Monoclonal antibodies can be prepared after the method of Milstein and Kohler by fusing splenocytes from immunized mice with continuously replicating tumor cells such as myeloma or lymphoma cells. (Milstein and Kohler, Nature 256:495-497, 1975; Gulfre and Milstein, Methods in Enzymology: Immunochemical Techniques 73:1-46, Langone and Banatis eds., Academic Press, 1981 which are incorporated by reference). The hybridoma cells so formed are then cloned by limiting dilution methods and supernates assayed for antibody production by ELISA, RIA or bioassay.

[0165] The unique ability of antibodies to recognize and specifically bind to target proteins provides an approach for treating an overexpression of the protein. Thus, another aspect of the present invention provides for a method for preventing or treating diseases involving overexpression of a CA polypeptide by treatment of a patient with specific antibodies to the CA protein.

[0166] Specific antibodies, either polyclonal or monoclonal, to the CA proteins can be produced by any suitable method known in the art as discussed above. For example, murine or human monoclonal antibodies can be produced by hybridoma technology or, alternatively, the CA proteins, or an immunologically active fragment thereof, or an anti-idiotypic antibody, or fragment thereof can be administered to an animal to elicit the production of antibodies capable of recognizing and binding to the CA proteins. Such antibodies can be from any class of antibodies including, but not limited to IgG, IgA, IgM, IgD, and IgE or in the case of avian species, IgY and from any subclass of antibodies.

[0167] By immunotherapy is meant treatment of a cancer with an antibody raised against a CA protein. As used herein, immunotherapy can be passive or active. Passive immunotherapy as defined herein is the passive transfer of antibody to a recipient (patient). Active immunization is the induction of antibody and/or T-cell responses in a recipient (patient). Induction of an immune response is the result of providing the recipient with an antigen to which antibodies are raised. As appreciated by one of ordinary skill in the art, the antigen may be provided by injecting a polypeptide against which antibodies are desired to be raised into a recipient, or contacting the recipient with a nucleic acid capable of expressing the antigen and under conditions for expression of the antigen.

[0168] In a preferred embodiment, oncogenes which encode secreted growth factors may be inhibited by raising antibodies against CA proteins that are secreted proteins as described above. Without being bound by theory, antibodies used for treatment, bind and prevent the secreted protein from binding to its receptor, thereby inactivating the secreted CA protein.

[0169] In another preferred embodiment, the CA protein to which antibodies are raised is a transmembrane protein. Without being bound by theory, antibodies used for treatment, bind the extracellular domain of the CA protein and prevent it from binding to other proteins, such as circulating ligands or cell-associated molecules. The antibody may cause down-regulation of the transmembrane CA protein. As will be appreciated by one of ordinary skill in the art, the antibody may be a competitive, non-competitive or uncompetitive inhibitor of protein binding to the extracellular domain of the CA protein. The antibody is also an antagonist of the CA protein. Further, the antibody prevents activation of the transmembrane CA protein. In one aspect, when the antibody prevents the binding of other molecules to the CA protein, the antibody prevents growth of the cell. The antibody may also sensitize the cell to cytotoxic agents, including, but not limited to TNF-α, TNF-β, IL-1, INF-γ and IL-2, or chemotherapeutic agents including 5FU, vinblastine, actinomycin D, cisplatin, methotrexate, and the like. In some instances the antibody belongs to a sub-type that activates serum complement when complexed with the transmembrane protein thereby mediating cytotoxicity. Thus, cancers may be treated by administering to a patient antibodies directed against the transmembrane CA protein.

[0170] In another preferred embodiment, the antibody is conjugated to a therapeutic moiety. In one aspect the therapeutic moiety is a small molecule that modulates the activity of the CA protein. In another aspect the therapeutic moiety modulates the activity of molecules associated with or in close proximity to the CA protein. The therapeutic moiety may inhibit enzymatic activity such as protease or protein kinase activity associated with cancer.

[0171] In a preferred embodiment, the therapeutic moiety may also be a cytotoxic agent. In this method, radioisotopes, natural toxins, chemotherapy agents, or other substances (such as biological response modifiers) are chemically linked or conjugated to a monoclonal antibody to form “immunoconjugates” and “immunotoxins” which target the cytotoxic agent to tumor tissue or cells resulting in a reduction in the number of afflicted cells, thereby reducing symptoms associated with cancers, including lymphoma. Cytotoxic agents are numerous and varied and include, but are not limited to, cytotoxic drugs or toxins or active fragments of such toxins. Suitable toxins and their corresponding fragments include diphtheria A chain, exotoxin A chain, ricin A chain, abrin A chain, curcin, crotin, phenomycin, enomycin and the like. Cytotoxic agents also include radiochemicals made by conjugating radioisotopes to antibodies raised against CA proteins, or binding of a radionuclide to a chelating agent that has been covalently attached to the antibody. Targeting the therapeutic moiety to transmembrane CA proteins not only serves to increase the local concentration of therapeutic moiety in the cancer of interest, i.e., lymphoma, but also serves to reduce deleterious side effects that may be associated with the therapeutic moiety. A number of investigators have used monoclonal antibodies as carriers of cytotoxic substances in attempts to selectively direct those agents to malignant tissue. More particularly, a number of monoclonal antibodies have been conjugated to toxins such as ricin, abrin, diphtheria toxin and Pseudomonas exotoxin or to enzymatically active portions (A chains) thereof via heterobifunctional agents. See, e.g., U.S. Pat. No. 4,753,894 to Frankel et al.; Nevelle, et al. (1982) Immunol Rev 62:75-91; Ross et al. (1980) Eur. J. Biochem 104; Vitteta et al. (1982)Immunol Rev 62:158-183; Raso et al. (1982) Cancer Res 42:457-464, and Trowbridge et al. (1981) Nature 294:171-173.

[0172] In another preferred embodiment, the CA protein against which the antibodies are raised is an intracellular protein. In this case, the antibody may be conjugated to a protein that facilitates entry into the cell. In one case, the antibody enters the cell by endocytosis. In another embodiment, a nucleic acid encoding the antibody is administered to the individual or cell. Moreover, wherein the CA protein can be targeted within a cell, e.g., the nucleus, an antibody thereto contains a signal for that target localization, e.g., a nuclear localization signal.

[0173] The CA antibodies of the invention specifically bind to CA proteins. By “specifically bind” herein is meant that the antibodies bind to the protein with a binding constant in the range of 10⁻⁴-10⁻⁶ M⁻¹, with a preferred range being 10⁻⁷-10⁻⁹ M⁻¹.

[0174] In a preferred embodiment, the CA protein is purified or isolated after expression. CA proteins may be isolated or purified in a variety of ways known to those skilled in the art depending on what other components are present in the sample. Standard purification methods include electrophoretic, molecular, immunological and chromatographic techniques, including ion exchange, hydrophobic, affinity, and reverse-phase HPLC chromatography, and chromatofocusing. For example, the CA protein may be purified using a standard anti-CA antibody column. Ultrafiltration and diafiltration techniques, in conjunction with protein concentration, are also useful. For general guidance in suitable purification techniques, see Scopes, R., Protein Purification, Springer-Verlag, NY (1982). The degree of purification necessary will vary depending on the use of the CA protein. In some instances no purification will be necessary.

### Detection of Cancer Phenotype

[0175] Once expressed and purified if necessary, the CA proteins and nucleic acids are useful in a number of applications. In one aspect, the expression levels of genes are determined for different cellular states in the cancer phenotype; that is, the expression levels of genes in normal tissue and in cancer tissue (and in some cases, for varying severities of lymphoma that relate to prognosis, as outlined below) are evaluated to provide expression profiles. An expression profile of a particular cell state or point of development is essentially a “fingerprint” of the state; while two states may have any particular gene similarly expressed, the evaluation of a number of genes simultaneously allows the generation of a gene expression profile that is unique to the state of the cell. By comparing expression profiles of cells in different states, information regarding which genes are important (including both up- and down-regulation of genes) in each of these states is obtained. Then, diagnosis may be done or confirmed: does tissue from a particular patient have the gene expression profile of normal or cancer tissue.

[0176] “Differential expression,” or equivalents used herein, refers to both qualitative as well as quantitative differences in the temporal and/or cellular expression patterns of genes, within and among the cells. Thus, a differentially expressed gene can qualitatively have its expression altered, including an activation or inactivation, in, for example, normal versus cancer tissue. That is, genes may be turned on or turned off in a particular state, relative to another state. As is apparent to the skilled artisan, any comparison of two or more states can be made. Such a qualitatively regulated gene will exhibit an expression pattern within a state or cell type which is detectable by standard techniques in one such state or cell type, but is not detectable in both. Alternatively, the determination is quantitative in that expression is increased or decreased; that is, the expression of the gene is either up-regulated, resulting in an increased amount of transcript, or down-regulated, resulting in a decreased amount of transcript. The degree to which expression differs need only be large enough to quantify via standard characterization techniques as outlined below, such as by use of Affymetrix GeneChip® expression arrays, Lockhart, Nature Biotechnology, 14:1675-1680 (1996), hereby expressly incorporated by reference. Other techniques include, but are not limited to, quantitative reverse transcriptase PCR, Northern analysis and RNase protection. As outlined above, preferably the change in expression (i.e. upregulation or downregulation) is at least about 50%, more preferably at least about 100%, more preferably at least about 150%, more preferably, at least about 200%, with from 300 to at least 1000% being especially preferred.

[0177] As will be appreciated by those in the art, this may be done by evaluation at either the gene transcript, or the protein level; that is, the amount of gene expression may be monitored using nucleic acid probes to the DNA or RNA equivalent of the gene transcript, and the quantification of gene expression levels, or, alternatively, the final gene product itself (protein) can be monitored, for example through the use of antibodies to the CA protein and standard immunoassays (ELISAs, etc.) or other techniques, including mass spectroscopy assays, 2D gel electrophoresis assays, etc. Thus, the proteins corresponding to CA genes, i.e. those identified as being important in a particular cancer phenotype, i.e., lymphoma, can be evaluated in a diagnostic test specific for that cancer.

[0178] In a preferred embodiment, gene expression monitoring is done and a number of genes, i.e. an expression profile, is monitored simultaneously, although multiple protein expression monitoring can be done as well. Similarly, these assays may be done on an individual basis as well.

[0179] In this embodiment, the CA nucleic acid probes may be attached to biochips as outlined herein for the detection and quantification of CA sequences in a particular cell. The assays are done as is known in the art. As will be appreciated by those in the art, any number of different CA sequences may be used as probes, with single sequence assays being used in some cases, and a plurality of the sequences described herein being used in other embodiments. In addition, while solid-phase assays are described, any number of solution based assays may be done as well.

[0180] In a preferred embodiment, both solid and solution based assays may be used to detect CA sequences that are up-regulated or down-regulated in cancers as compared to normal tissue. In instances where the CA sequence has been altered but shows the same expression profile or an altered expression profile, the protein will be detected as outlined herein.

[0181] In a preferred embodiment nucleic acids encoding the CA protein are detected. Although DNA or RNA encoding the CA protein may be detected, of particular interest are methods wherein the mRNA encoding a CA protein is detected. The presence of mRNA in a sample is an indication that the CA gene has been transcribed to form the mRNA, and suggests that the protein is expressed. Probes to detect the mRNA can be any nucleotide/deoxynucleotide probe that is complementary to and base pairs with the mRNA and includes but is not limited to oligonucleotides, cDNA or RNA. Probes also should contain a detectable label, as defined herein. In one method the mRNA is detected after immobilizing the nucleic acid to be examined on a solid support such as nylon membranes and hybridizing the probe with the sample. Following washing to remove the non-specifically bound probe, the label is detected. In another method detection of the mRNA is performed in situ. In this method permeabilized cells or tissue samples are contacted with a detectably labeled nucleic acid probe for sufficient time to allow the probe to hybridize with the target mRNA. Following washing to remove the non-specifically bound probe, the label is detected. For example a digoxygenin labeled riboprobe (RNA probe) that is complementary to the mRNA encoding a CA protein is detected by binding the digoxygenin with an anti-digoxygenin secondary antibody and developed with nitro blue tetrazolium and 5-bromo-4-chloro-3-indoyl phosphate.

[0182] In a preferred embodiment, any of the three classes of proteins as described herein (secreted, transmembrane or intracellular proteins) are used in diagnostic assays. The CA proteins, antibodies, nucleic acids, modified proteins and cells containing CA sequences are used in diagnostic assays. This can be done on an individual gene or corresponding polypeptide level, or as sets of assays.

[0183] As described and defined herein, CA proteins find use as markers of cancers, including lymphomas such as, but not limited to, Hodgkin's and non-Hodgkin's lymphoma. Detection of these proteins in putative cancer tissue or patients allows for a determination or diagnosis of the type of cancer. Numerous methods known to those of ordinary skill in the art find use in detecting cancers. In one embodiment, antibodies are used to detect CA proteins. A preferred method separates proteins from a sample or patient by electrophoresis on a gel (typically a denaturing and reducing protein gel, but may be any other type of gel including isoelectric focusing gels and the like). Following separation of proteins, the CA protein is detected by immunoblotting with antibodies raised against the CA protein. Methods of immunoblotting are well known to those of ordinary skill in the art.

[0184] In another preferred method, antibodies to the CA protein find use in in situ imaging techniques. In this method cells are contacted with from one to many antibodies to the CA protein(s). Following washing to remove non-specific antibody binding, the presence of the antibody or antibodies is detected. In one embodiment the antibody is detected by incubating with a secondary antibody that contains a detectable label. In another method the primary antibody to the CA protein(s) contains a detectable label. In another preferred embodiment each one of multiple primary antibodies contains a distinct and detectable label. This method finds particular use in simultaneous screening for a plurality of CA proteins. As will be appreciated by one of ordinary skill in the art, numerous other histological imaging techniques are useful in the invention.

[0185] In a preferred embodiment the label is detected in a fluorometer that has the ability to detect and distinguish emissions of different wavelengths. In addition, a fluorescence activated cell sorter (FACS) can be used in the method.

[0186] In another preferred embodiment, antibodies find use in diagnosing cancers from blood samples. As previously described, certain CA proteins are secreted/circulating molecules. Blood samples, therefore, are useful as samples to be probed or tested for the presence of secreted CA proteins. Antibodies can be used to detect the CA proteins by any of the previously described immunoassay techniques including ELISA, immunoblotting (Western blotting), immunoprecipitation, BIACORE technology and the like, as will be appreciated by one of ordinary skill in the art.

[0187] In a preferred embodiment, in situ hybridization of labeled CA nucleic acid probes to tissue arrays is done. For example, arrays of tissue samples, including CA tissue and/or normal tissue, are made. In situ hybridization as is known in the art can then be done.

[0188] It is understood that when comparing the expression fingerprints between an individual and a standard, the skilled artisan can make a diagnosis as well as a prognosis. It is further understood that the genes that indicate diagnosis may differ from those that indicate prognosis.

[0189] In a preferred embodiment, the CA proteins, antibodies, nucleic acids, modified proteins and cells containing CA sequences are used in prognosis assays. As above, gene expression profiles can be generated that correlate to cancer, especially lymphoma, severity, in terms of long term prognosis. Again, this may be done on either a protein or gene level, with the use of genes being preferred. As above, the CA probes are attached to biochips for the detection and quantification of CA sequences in a tissue or patient. The assays proceed as outlined for diagnosis.

### Screening for CA-Targeted Drugs

[0190] In one embodiment, any of the CA sequences as described herein are used in drug screening assays. The CA proteins, antibodies, nucleic acids, modified proteins and cells containing CA sequences are used in drug screening assays or by evaluating the effect of drug candidates on a “gene expression profile” or expression profile of polypeptides. In one embodiment, the expression profiles are used, preferably in conjunction with high throughput screening techniques to allow monitoring for expression profile genes after treatment with a candidate agent, Zlokarnik, et al., Science 279, 84-8 (1998), Heid, et al., Genome Res., 6:986-994 (1996).

[0191] In another embodiment, the CA proteins, antibodies, nucleic acids, modified proteins and cells containing the native or modified CA proteins are used in screening assays. That is, the present invention provides novel methods for screening for compositions that modulate the cancer phenotype. As above, this can be done by screening for modulators of gene expression or for modulators of protein activity. Similarly, this may be done on an individual gene or protein level or by evaluating the effect of drug candidates on a “gene expression profile”. In a preferred embodiment, the expression profiles are used, preferably in conjunction with high throughput screening techniques to allow monitoring for expression profile genes after treatment with a candidate agent, see Zlokarnik, supra.

[0192] Having identified the CA genes herein, a variety of assays to evaluate the effects of agents on gene expression may be executed. In a preferred embodiment, assays may be run on an individual gene or protein level. That is, having identified a particular gene as aberrantly regulated in cancer, candidate bioactive agents may be screened to modulate the gene's regulation. “Modulation” thus includes both an increase and a decrease in gene expression or activity. The preferred amount of modulation will depend on the original change of the gene expression in normal versus tumor tissue, with changes of at least 10%, preferably 50%, more preferably 100-300%, and in some embodiments 300-1000% or greater. Thus, if a gene exhibits a 4 fold increase in tumor compared to normal tissue, a decrease of about four fold is desired; a 10 fold decrease in tumor compared to normal tissue gives a 10 fold increase in expression for a candidate agent is desired, etc. Alternatively, where the CA sequence has been altered but shows the same expression profile or an altered expression profile, the protein will be detected as outlined herein.

[0193] As will be appreciated by those in the art, this may be done by evaluation at either the gene or the protein level; that is, the amount of gene expression may be monitored using nucleic acid probes and the quantification of gene expression levels, or, alternatively, the level of the gene product itself can be monitored, for example through the use of antibodies to the CA protein and standard immunoassays. Alternatively, binding and bioactivity assays with the protein may be done as outlined below.

[0194] In a preferred embodiment, gene expression monitoring is done and a number of genes, i.e. an expression profile, is monitored simultaneously, although multiple protein expression monitoring can be done as well.

[0195] In this embodiment, the CA nucleic acid probes are attached to biochips as outlined herein for the detection and quantification of CA sequences in a particular cell. The assays are further described below.

[0196] Generally, in a preferred embodiment, a candidate bioactive agent is added to the cells prior to analysis. Moreover, screens are provided to identify a candidate bioactive agent that modulates a particular type of cancer, modulates CA proteins, binds to a CA protein, or interferes between the binding of a CA protein and an antibody.

[0197] The term “candidate bioactive agent” or “drug candidate” or grammatical equivalents as used herein describes any molecule, e.g., protein, oligopeptide, small organic or inorganic molecule, polysaccharide, polynucleotide, etc., to be tested for bioactive agents that are capable of directly or indirectly altering either the cancer phenotype, binding to and/or modulating the bioactivity of a CA protein, or the expression of a CA sequence, including both nucleic acid sequences and protein sequences. In a particularly preferred embodiment, the candidate agent suppresses a CA phenotype, for example to a normal tissue fingerprint. Similarly, the candidate agent preferably suppresses a severe CA phenotype. Generally a plurality of assay mixtures are run in parallel with different agent concentrations to obtain a differential response to the various concentrations. Typically, one of these concentrations serves as a negative control, i.e., at zero concentration or below the level of detection.

[0198] In one aspect, a candidate agent will neutralize the effect of a CA protein. By “neutralize” is meant that activity of a protein is either inhibited or counter acted against so as to have substantially no effect on a cell.

[0199] Candidate agents encompass numerous chemical classes, though typically they are organic or inorganic molecules, preferably small organic compounds having a molecular weight of more than 100 and less than about 2,500 Daltons. Preferred small molecules are less than 2000, or less than 1500 or less than 1000 or less than 500 D. Candidate agents comprise functional groups necessary for structural interaction with proteins, particularly hydrogen bonding, and typically include at least an amine, carbonyl, hydroxyl or carboxyl group, preferably at least two of the functional chemical groups. The candidate agents often comprise cyclical carbon or heterocyclic structures and/or aromatic or polyaromatic structures substituted with one or more of the above functional groups. Candidate agents are also found among biomolecules including peptides, saccharides, fatty acids, steroids, purines, pyrimidines, derivatives, structural analogs or combinations thereof. Particularly preferred are peptides.

[0200] Candidate agents are obtained from a wide variety of sources including libraries of synthetic or natural compounds. For example, numerous means are available for random and directed synthesis of a wide variety of organic compounds and biomolecules, including expression of randomized oligonucleotides. Alternatively, libraries of natural compounds in the form of bacterial, fungal, plant and animal extracts are available or readily produced. Additionally, natural or synthetically produced libraries and compounds are readily modified through conventional chemical, physical and biochemical means. Known pharmacological agents may be subjected to directed or random chemical modifications, such as acylation, alkylation, esterification, or amidification to produce structural analogs.

[0201] In one embodiment, the candidate bioactive agents are proteins. By “protein” herein is meant at least two covalently attached amino acids, which includes proteins, polypeptides, oligopeptides and peptides. The protein may be made up of naturally occurring amino acids and peptide bonds, or synthetic peptidomimetic structures. Thus “amino acid”, or “peptide residue”, as used herein means both naturally occurring and synthetic amino acids. For example, homo-phenylalanine, citrulline and norleucine are considered amino acids for the purposes of the invention. “Amino acid” also includes imino acid residues such as proline and hydroxyproline. The side chains may be in either the (R) or the (S) configuration. In the preferred embodiment, the amino acids are in the (S) or L-configuration. If non-naturally occurring side chains are used, non-amino acid substituents may be used, for example to prevent or retard in vivo degradations.

[0202] In a preferred embodiment, the candidate bioactive agents are naturally occurring proteins or fragments of naturally occurring proteins. Thus, for example, cellular extracts containing proteins, or random or directed digests of proteinaceous cellular extracts, may be used. In this way libraries of prokaryotic and eukaryotic proteins may be made for screening in the methods of the invention. Particularly preferred in this embodiment are libraries of bacterial, fungal, viral, and mammalian proteins, with the latter being preferred, and human proteins being especially preferred.

[0203] In another preferred embodiment, the candidate bioactive agents are peptides of from about 5 to about 30 amino acids, with from about 5 to about 20 amino acids being preferred, and from about 7 to about 15 being particularly preferred. The peptides may be digests of naturally occurring proteins as is outlined above, random peptides, or “biased” random peptides. By “randomized” or grammatical equivalents herein is meant that each nucleic acid and peptide consists of essentially random nucleotides and amino acids, respectively. Since generally these random peptides (or nucleic acids, discussed below) are chemically synthesized, they may incorporate any nucleotide or amino acid at any position. The synthetic process can be designed to generate randomized proteins or nucleic acids, to allow the formation of all or most of the possible combinations over the length of the sequence, thus forming a library of randomized candidate bioactive proteinaceous agents.

[0204] In one embodiment, the library is fully randomized, with no sequence preferences or constants at any position. In a preferred embodiment, the library is biased. That is, some positions within the sequence are either held constant, or are selected from a limited number of possibilities. For example, in a preferred embodiment, the nucleotides or amino acid residues are randomized within a defined class, for example, of hydrophobic amino acids, hydrophilic residues, sterically biased (either small or large) residues, towards the creation of nucleic acid binding domains, the creation of cysteines, for cross-linking, prolines for SH-3 domains, serines, threonines, tyrosines or histidines for phosphorylation sites, etc., or to purines, etc.

[0205] In one embodiment, the candidate bioactive agents are nucleic acids. As described generally for proteins, nucleic acid candidate bioactive agents may be naturally occurring nucleic acids, random nucleic acids, or “biased” random nucleic acids. In another embodiment, the candidate bioactive agents are organic chemical moieties, a wide variety of which are available in the literature.

[0206] In assays for testing alteration of the expression profile of one or more CA genes, after the candidate agent has been added and the cells allowed to incubate for some period of time, a nucleic acid sample containing the target sequences to be analyzed is prepared. The target sequence is prepared using known techniques (e.g., converted from RNA to labeled cDNA, as described above) and added to a suitable microarray. For example, an in vitro reverse transcription with labels covalently attached to the nucleosides is performed. Generally, the nucleic acids are labeled with a label as defined herein, especially with biotin-FITC or PE, Cy3 and Cy5.

[0207] As will be appreciated by those in the art, these assays can be direct hybridization assays or can comprise “sandwich assays”, which include the use of multiple probes, as is generally outlined in U.S. Pat. Nos. 5,681,702, 5,597,909, 5,545,730, 5,594,117, 5,591,584, 5,571,670, 5,580,731, 5,571,670, 5,591,584, 5,624,802, 5,635,352, 5,594,118, 5,359,100, 5,124,246 and 5,681,697, all of which are hereby incorporated by reference. In this embodiment, in general, the target nucleic acid is prepared as outlined above, and then added to the biochip comprising a plurality of nucleic acid probes, under conditions that allow the formation of a hybridization complex.

[0208] A variety of hybridization conditions may be used in the present invention, including high, moderate and low stringency conditions as outlined above. The assays are generally run under stringency conditions that allow formation of the label probe hybridization complex only in the presence of target. Stringency can be controlled by altering a step parameter that is a thermodynamic variable, including, but not limited to, temperature, formamide concentration, salt concentration, chaotropic salt concentration, pH, organic solvent concentration, etc. These parameters may also be used to control non-specific binding, as is generally outlined in U.S. Pat. No. 5,681,697. Thus it may be desirable to perform certain steps at higher stringency conditions to reduce non-specific binding.

[0209] The reactions outlined herein may be accomplished in a variety of ways, as will be appreciated by those in the art. Components of the reaction may be added simultaneously, or sequentially, in any order, with preferred embodiments outlined below. In addition, the reaction may include a variety of other reagents in the assays. These include reagents like salts, buffers, neutral proteins, e.g. albumin, detergents, etc which may be used to facilitate optimal hybridization and detection, and/or reduce non-specific or background interactions. Also reagents that otherwise improve the efficiency of the assay, such as protease inhibitors, nuclease inhibitors, anti-microbial agents, etc., may be used, depending on the sample preparation methods and purity of the target. In addition, either solid phase or solution based (i.e., kinetic PCR) assays may be used.

[0210] Once the assay is run, the data are analyzed to determine the expression levels, and changes in expression levels as between states, of individual genes, forming a gene expression profile.

[0211] In a preferred embodiment, as for the diagnosis and prognosis applications, having identified the differentially expressed gene(s) or mutated gene(s) important in any one state, screens can be run to test for alteration of the expression of the CA genes individually. That is, screening for modulation of regulation of expression of a single gene can be done. Thus, for example, in the case of target genes whose presence or absence is unique between two states, screening is done for modulators of the target gene expression.

[0212] In addition, screens can be done for novel genes that are induced in response to a candidate agent. After identifying a candidate agent based upon its ability to suppress a CA expression pattern leading to a normal expression pattern, or modulate a single CA gene expression profile so as to mimic the expression of the gene from normal tissue, a screen as described above can be performed to identify genes that are specifically modulated in response to the agent. Comparing expression profiles between normal tissue and agent treated CA tissue reveals genes that are not expressed in normal tissue or CA tissue, but are expressed in agent treated tissue. These agent specific sequences can be identified and used by any of the methods described herein for CA genes or proteins. In particular these sequences and the proteins they encode find use in marking or identifying agent-treated cells. In addition, antibodies can be raised against the agent-induced proteins and used to target novel therapeutics to the treated CA tissue sample.

[0213] Thus, in one embodiment, a candidate agent is administered to a population of CA cells, that thus has an associated CA expression profile. By “administration” or “contacting” herein is meant that the candidate agent is added to the cells in such a manner as to allow the agent to act upon the cell, whether by uptake and intracellular action, or by action at the cell surface. In some embodiments, nucleic acid encoding a proteinaceous candidate agent (i.e. a peptide) may be put into a viral construct such as a retroviral construct and added to the cell, such that expression of the peptide agent is accomplished; see PCT US97/01019, hereby expressly incorporated by reference.

[0214] Once the candidate agent has been administered to the cells, the cells can be washed if desired and are allowed to incubate under preferably physiological conditions for some period of time. The cells are then harvested and a new gene expression profile is generated, as outlined herein.

[0215] Thus, for example, CA tissue may be screened for agents that reduce or suppress the CA phenotype. A change in at least one gene of the expression profile indicates that the agent has an effect on CA activity. By defining such a signature for the CA phenotype, screens for new drugs that alter the phenotype can be devised. With this approach, the drug target need not be known and need not be represented in the original expression screening platform, nor does the level of transcript for the target protein need to change.

[0216] In a preferred embodiment, as outlined above, screens may be done on individual genes and gene products (proteins). That is, having identified a particular differentially expressed gene as important in a particular state, screening of modulators of either the expression of the gene or the gene product itself can be done. The gene products of differentially expressed genes are sometimes referred to herein as “CA proteins” or “CAP”. The CAP may be a fragment, or alternatively, be the full-length protein to the fragment encoded by the nucleic acids of Tables 1-21 (human genomic sequences of SEQ ID NOS: 4, 17, 32, 42, 50, 58, 74, 77, 87, 99, 112, 122, 145, 163, 169, 177, and 185, and sequences of SEQ ID NOS: 5, 7, 9, 18, 20, 22, 24, 33, 35, 37, 43, 45, 51, 53, 59, 75, 78, 80, 82, 88, 90, 92, 94, 100, 102, 113, 115, 123, 146, 148, 150, 152, 154, 156, 158, 164, 170, 172, 178, 180, 186, 188, and 190 corresponding to the human mRNAs generated therefrom). In a preferred embodiment, the CAP is selected from the human protein sequences shown in Tables 1-21 (of SEQ ID NOS: 6, 8, 10, 19, 21, 23, 25, 34, 36, 38, 44, 46, 52, 54, 60, 76, 79, 81, 83, 89, 91, 93, 95, 101, 103, 114, 116, 124, 147, 149, 151, 153, 155, 157, 159, 165, 171, 173, 179, 181, 187, 189, and 191). In another embodiment, the sequences are sequence variants as further described herein.

[0217] Preferably, the CAP is a fragment approximately 14 to 24 amino acids in length. More preferably the fragment is a soluble fragment. Preferably, the fragment includes a non-transmembrane region. In a preferred embodiment, the fragment has an N-terminal Cys to aid in solubility. In one embodiment, the C-terminus of the fragment is kept as a free acid and the N-terminus is a free amine to aid in coupling, e.g., to a cysteine.

[0218] In one embodiment the CA proteins are conjugated to an immunogenic agent as discussed herein. In one embodiment the CA protein is conjugated to BSA.

[0219] In a preferred embodiment, screening is done to alter the biological function of the expression product of the CA gene. Again, having identified the importance of a gene in a particular state, screening for agents that bind and/or modulate the biological activity of the gene product can be run as is more fully outlined below.

[0220] In a preferred embodiment, screens are designed to first find candidate agents that can bind to CA proteins, and then these agents may be used in assays that evaluate the ability of the candidate agent to modulate the CAP activity and the cancer phenotype. Thus, as will be appreciated by those in the art, there are a number of different assays that may be run; binding assays and activity assays.

[0221] In a preferred embodiment, binding assays are done. In general, purified or isolated gene product is used; that is, the gene products of one or more CA nucleic acids are made. In general, this is done as is known in the art. For example, antibodies are generated to the protein gene products, and standard immunoassays are run to determine the amount of protein present. Alternatively, cells comprising the CA proteins can be used in the assays.

[0222] Thus, in a preferred embodiment, the methods comprise combining a CA protein and a candidate bioactive agent, and determining the binding of the candidate agent to the CA protein. Preferred embodiments utilize the human or mouse CA protein, although other mammalian proteins may also be used, for example for the development of animal models of human disease. In some embodiments, as outlined herein, variant or derivative CA proteins may be used.

[0223] Generally, in a preferred embodiment of the methods herein, the CA protein or the candidate agent is non-diffusably bound to an insoluble support having isolated sample receiving areas (e.g. a microtiter plate, an array, etc.). The insoluble support may be made of any composition to which the compositions can be bound, is readily separated from soluble material, and is otherwise compatible with the overall method of screening. The surface of such supports may be solid or porous and of any convenient shape. Examples of suitable insoluble supports include microtiter plates, arrays, membranes and beads. These are typically made of glass, plastic (e.g., polystyrene), polysaccharides, nylon or nitrocellulose, Teflon®, etc. Microtiter plates and arrays are especially convenient because a large number of assays can be carried out simultaneously, using small amounts of reagents and samples.

[0224] The particular manner of binding of the composition is not crucial so long as it is compatible with the reagents and overall methods of the invention, maintains the activity of the composition and is nondiffusable. Preferred methods of binding include the use of antibodies (which do not sterically block either the ligand binding site or activation sequence when the protein is bound to the support), direct binding to “sticky” or ionic supports, chemical crosslinking, the synthesis of the protein or agent on the surface, etc. Following binding of the protein or agent, excess unbound material is removed by washing. The sample receiving areas may then be blocked through incubation with bovine serum albumin (BSA), casein or other innocuous protein or other moiety.

[0225] In a preferred embodiment, the CA protein is bound to the support, and a candidate bioactive agent is added to the assay. Alternatively, the candidate agent is bound to the support and the CA protein is added. Novel binding agents include specific antibodies, non-natural binding agents identified in screens of chemical libraries, peptide analogs, etc. Of particular interest are screening assays for agents that have a low toxicity for human cells. A wide variety of assays may be used for this purpose, including labeled in vitro protein-protein binding assays, electrophoretic mobility shift assays, immunoassays for protein binding, functional assays (phosphorylation assays, etc.) and the like.

[0226] The determination of the binding of the candidate bioactive agent to the CA protein may be done in a number of ways. In a preferred embodiment, the candidate bioactive agent is labeled, and binding determined directly. For example, this may be done by attaching all or a portion of the CA protein to a solid support, adding a labeled candidate agent (for example a fluorescent label), washing off excess reagent, and determining whether the label is present on the solid support. Various blocking and washing steps may be utilized as is known in the art.

[0227] By “labeled” herein is meant that the compound is either directly or indirectly labeled with a label which provides a detectable signal, e.g. radioisotope, fluorescers, enzyme, antibodies, particles such as magnetic particles, chemiluminescers, or specific binding molecules, etc. Specific binding molecules include pairs, such as biotin and streptavidin, digoxin and antidigoxin etc. For the specific binding members, the complementary member would normally be labeled with a molecule which provides for detection, in accordance with known procedures, as outlined above. The label can directly or indirectly provide a detectable signal.

[0228] In some embodiments, only one of the components is labeled. For example, the proteins (or proteinaceous candidate agents) may be labeled at tyrosine positions using ¹²⁵I, or with fluorophores. Alternatively, more than one component may be labeled with different labels; using ¹²⁵I for the proteins, for example, and a fluorophore for the candidate agents.

[0229] In a preferred embodiment, the binding of the candidate bioactive agent is determined through the use of competitive binding assays. In this embodiment, the competitor is a binding moiety known to bind to the target molecule (i.e. CA protein), such as an antibody, peptide, binding partner, ligand, etc. Under certain circumstances, there may be competitive binding as between the bioactive agent and the binding moiety, with the binding moiety displacing the bioactive agent.

[0230] In one embodiment, the candidate bioactive agent is labeled. Either the candidate bioactive agent, or the competitor, or both, is added first to the protein for a time sufficient to allow binding, if present. Incubations may be performed at any temperature which facilitates optimal activity, typically between 4 and 40° C. Incubation periods are selected for optimum activity, but may also be optimized to facilitate rapid high throughput screening. Typically between 0.1 and 1 hour will be sufficient. Excess reagent is generally removed or washed away. The second component is then added, and the presence or absence of the labeled component is followed, to indicate binding.

[0231] In a preferred embodiment, the competitor is added first, followed by the candidate bioactive agent. Displacement of the competitor is an indication that the candidate bioactive agent is binding to the CA protein and thus is capable of binding to, and potentially modulating, the activity of the CA protein. In this embodiment, either component can be labeled. Thus, for example, if the competitor is labeled, the presence of label in the wash solution indicates displacement by the agent. Alternatively, if the candidate bioactive agent is labeled, the presence of the label on the support indicates displacement.

[0232] In an alternative embodiment, the candidate bioactive agent is added first, with incubation and washing, followed by the competitor. The absence of binding by the competitor may indicate that the bioactive agent is bound to the CA protein with a higher affinity. Thus, if the candidate bioactive agent is labeled, the presence of the label on the support, coupled with a lack of competitor binding, may indicate that the candidate agent is capable of binding to the CA protein.

[0233] In a preferred embodiment, the methods comprise differential screening to identity bioactive agents that are capable of modulating the activity of the CA proteins. In this embodiment, the methods comprise combining a CA protein and a competitor in a first sample. A second sample comprises a candidate bioactive agent, a CA protein and a competitor. The binding of the competitor is determined for both samples, and a change, or difference in binding between the two samples indicates the presence of an agent capable of binding to the CA protein and potentially modulating its activity. That is, if the binding of the competitor is different in the second sample relative to the first sample, the agent is capable of binding to the CA protein.

[0234] Alternatively, a preferred embodiment utilizes differential screening to identify drug candidates that bind to the native CA protein, but cannot bind to modified CA proteins. The structure of the CA protein may be modeled, and used in rational drug design to synthesize agents that interact with that site. Drug candidates that affect CA bioactivity are also identified by screening drugs for the ability to either enhance or reduce the activity of the protein.

[0235] Positive controls and negative controls may be used in the assays. Preferably all control and test samples are performed in at least triplicate to obtain statistically significant results. Incubation of all samples is for a time sufficient for the binding of the agent to the protein. Following incubation, all samples are washed free of non-specifically bound material and the amount of bound, generally labeled agent determined. For example, where a radiolabel is employed, the samples may be counted in a scintillation counter to determine the amount of bound compound.

[0236] A variety of other reagents may be included in the screening assays. These include reagents like salts, neutral proteins, e.g. albumin, detergents, etc which may be used to facilitate optimal protein-protein binding and/or reduce non-specific or background interactions. Also reagents that otherwise improve the efficiency of the assay, such as protease inhibitors, nuclease inhibitors, anti-microbial agents, etc., may be used. The mixture of components may be added in any order that provides for the requisite binding.

[0237] Screening for agents that modulate the activity of CA proteins may also be done. In a preferred embodiment, methods for screening for a bioactive agent capable of modulating the activity of CA proteins comprise the steps of adding a candidate bioactive agent to a sample of CA proteins, as above, and determining an alteration in the biological activity of CA proteins. “Modulating the activity of a CA protein” includes an increase in activity, a decrease in activity, or a change in the type or kind of activity present. Thus, in this embodiment, the candidate agent should both bind to CA proteins (although this may not be necessary), and alter its biological or biochemical activity as defined herein. The methods include both in vitro screening methods, as are generally outlined above, and in vivo screening of cells for alterations in the presence, distribution, activity or amount of CA proteins.

[0238] Thus, in this embodiment, the methods comprise combining a CA sample and a candidate bioactive agent, and evaluating the effect on CA activity. By “CA activity” or grammatical equivalents herein is meant one of the CA protein's biological activities, including, but not limited to, its role in tumorigenesis, including cell division, preferably in lymphatic tissue, cell proliferation, tumor growth and transformation of cells. In one embodiment, CA activity includes activation of or by a protein encoded by a nucleic acid of Tables 1-21. An inhibitor of CA activity is the inhibition of any one or more CA activities.

[0239] In a preferred embodiment, the activity of the CA protein is increased; in another preferred embodiment, the activity of the CA protein is decreased. Thus, bioactive agents that are antagonists are preferred in some embodiments, and bioactive agents that are agonists may be preferred in other embodiments.

[0240] In a preferred embodiment, the invention provides methods for screening for bioactive agents capable of modulating the activity of a CA protein. The methods comprise adding a candidate bioactive agent, as defined above, to a cell comprising CA proteins. Preferred cell types include almost any cell. The cells contain a recombinant nucleic acid that encodes a CA protein. In a preferred embodiment, a library of candidate agents is tested on a plurality of cells.

[0241] In one aspect, the assays are evaluated in the presence or absence or previous or subsequent exposure of physiological signals, for example hormones, antibodies, peptides, antigens, cytokines, growth factors, action potentials, pharmacological agents including chemotherapeutics, radiation, carcinogenics, or other cells (i.e. cell-cell contacts). In another example, the determinations are determined at different stages of the cell cycle process.

[0242] In this way, bioactive agents are identified. Compounds with pharmacological activity are able to enhance or interfere with the activity of the CA protein.

### APPLICATIONS OF THE INVENTION

[0243] In one embodiment, a method of inhibiting cancer cell division is provided. In another embodiment, a method of inhibiting tumor growth is provided. In a further embodiment, methods of treating cells or individuals with cancer are provided.

[0244] The method comprises administration of a cancer inhibitor. In particular embodiments, the cancer inhibitor is an antisense molecule, a pharmaceutical composition, a therapeutic agent or small molecule, or a monoclonal, polyclonal, chimeric or humanized antibody. In particular embodiments, a therapeutic agent is coupled with a an antibody, preferable a monoclonal antobody.

[0245] In other embodiments, methods for detection or diagnosis of cancer cells in an individual are provided. In particular embodiments, the diagnostic/detection agent is a small molecule that pereferentially binds to a CAP according to the invention. In one embodiment, the diagnostic/detection agent is an antibody, preferably a monoclonal antobody, preferably linked to a detectable agent.

[0246] In other embodiments of the invention, animal models and transgenic animals are provided, which find use in generating animal models of cancers, particularly lymphomas and carcinomas.

### (a) Antisense Molecules

[0247] In one embodiment, the cancer inhibitor is an antisense molecule. Antisense molecules as used herein include antisense or sense oligonucleotides comprising a single-stranded nucleic acid sequence (either RNA or DNA) capable of binding to target mRNA (sense) or DNA (antisense) sequences for cancer molecules. Antisense or sense oligonucleotides, according to the present invention, comprise a fragment generally at least about 14 nucleotides, preferably from about 14 to 30 nucleotides. The ability to derive an antisense or a sense oligonucleotide, based upon a cDNA sequence encoding a given protein is described in, for example, Stein and Cohen, Cancer Res. 48:2659, (1988) and van der Krol et al., BioTechniques 6:958, (1988).

[0248] Antisense molecules can be modified or unmodified RNA, DNA, or mixed polymer oligonucleotides. These molecules function by specifically binding to matching sequences resulting in inhibition of peptide synthesis (Wu-Pong, November 1994, BioPharm, 20-33) either by steric blocking or by activating an RNase H enzyme. Antisense molecules can also alter protein synthesis by interfering with RNA processing or transport from the nucleus into the cytoplasm (Mukhopadhyay & Roth, 1996, Crit. Rev. in Oncogenesis 7, 151-190). In addition, binding of single stranded DNA to RNA can result in nuclease-mediated degradation of the heteroduplex (Wu-Pong, supra). Backbone modified DNA chemistry which have thus far been shown to act as substrates for RNase H are phosphorothioates, phosphorodithioates, borontrifluoridates, and 2′-arabino and 2′-fluoro arabino-containing oligonucleotides.

[0249] Antisense molecules may be introduced into a cell containing the target nucleotide sequence by formation of a conjugate with a ligand binding molecule, as described in WO 91/04753. Suitable ligand binding molecules include, but are not limited to, cell surface receptors, growth factors, other cytokines, or other ligands that bind to cell surface receptors. Preferably, conjugation of the ligand binding molecule does not substantially interfere with the ability of the ligand binding molecule to bind to its corresponding molecule or receptor, or block entry of the sense or antisense oligonucleotide or its conjugated version into the cell. Alternatively, a sense or an antisense oligonucleotide may be introduced into a cell containing the target nucleic acid sequence by formation of an oligonucleotide-lipid complex, as described in WO 90/10448. It is understood that the use of antisense molecules or knock out and knock in models may also be used in screening assays as discussed above, in addition to methods of treatment.

### (b) RNA Interference

[0250] RNA interference refers to the process of sequence-specific post transcriptional gene silencing in animals mediated by short interfering RNAs (siRNA) (Fire et al., Nature, 391, 806 (1998)). The corresponding process in plants is referred to as post transcriptional gene silencing or RNA silencing and is also referred to as quelling in fingi. The presence of dsRNA in cells triggers the RNAi response though a mechanism that has yet to be fully characterized. This mechanism appears to be different from the interferon response that results from dsRNA mediated activation of protein kinase PKR and 2′,5′-oligoadenylate synthetase resulting in non-specific cleavage of mRNA by ribonuclease L. (reviewed in Sharp, P. A., RNA interference—2001, Genes & Development 15:485-490 (2001)).

[0251] Small interfering RNAs (siRNAs) are powerful sequence-specific reagents designed to suppress the expression of genes in cultured mammalian cells through a process known as RNA interference (RNAi). Elbashir, S. M. et al. Nature 411:494-498 (2001); Caplen, N. J. et al. Proc. Natl. Acad. Sci. USA 98:9742-9747 (2001); Harborth, J. et al. J Cell Sci. 114:4557-4565 (2001). The term “short interfering RNA” or “siRNA” refers to a double stranded nucleic acid molecule capable of RNA interference “RNAi”, (see Kreutzer et al., WO 00/44895; Zernicka-Goetz et al. WO 01/36646; Fire, WO 99/32619; Mello and Fire, WO 01/29058). As used herein, siRNA molecules are limited to RNA molecules but further encompasses chemically modified nucleotides and non-nucleotides. siRNA gene-targeting experiments have been carried out by transient siRNA transfer into cells (achieved by such classic methods as liposome-mediated transfection, electroporation, or microinjection).

[0252] Molecules of siRNA are 21- to 23-nucleotide RNAs, with characteristic 2- to 3-nucleotide 3′-overhanging ends resembling the RNase III processing products of long double-stranded RNAs (dsRNAs) that normally initiate RNAi. When introduced into a cell, they assemble with yet-to-be-identified proteins of an endonuclease complex (RNA-induced silencing complex), which then guides target mRNA cleavage. As a consequence of degradation of the targeted mRNA, cells with a specific phenotype characteristic of suppression of the corresponding protein product are obtained. The small size of siRNAs, compared with traditional antisense molecules, prevents activation of the dsRNA-inducible interferon system present in mammalian cells. This avoids the nonspecific phenotypes normally produced by dsRNA larger than 30 base pairs in somatic cells.

[0253] Intracellular transcription of small RNA molecules is achieved by cloning the siRNA templates into RNA polymerase III (Pol III) transcription units, which normally encode the small nuclear RNA (snRNA) U6 or the human RNase P RNA H1. Two approaches have been developed for expressing siRNAs: in the first, sense and antisense strands constituting the siRNA duplex are transcribed by individual promoters (Lee, N. S. et al. Nat. Biotechnol. 20, 500-505 (2002). Miyagishi, M. & Taira, K. Nat. Biotechnol. 20, 497-500 (2002).); in the second, siRNAs are expressed as fold-back stem-loop structures that give rise to siRNAs after intracellular processing (Paul, C. P. et al. Nat. Biotechnol. 20:505-508 (2002)). The endogenous expression of siRNAs from introduced DNA templates is thought to overcome some limitations of exogenous siRNA delivery, in particular the transient loss of phenotype. U6 and H1 RNA promoters are members of the type III class of Pol III promoters. (Paule, M. R. & White, R. J. Nucleic Acids Res. 28, 1283-1298 (2000)).

[0254] Co-expression of sense and antisense siRNAs mediate silencing of target genes, whereas expression of sense or antisense siRNA alone do not greatly affect target gene expression. Transfection of plasmid DNA, rather than synthetic siRNAs, may appear advantageous, considering the danger of RNase contamination and the costs of chemically synthesized siRNAs or siRNA transcription kits. Stable expression of siRNAs allows new gene therapy applications, such as treatment of persistent viral infections. Considering the high specificity of siRNAs, the approach also allows the targeting of disease-derived transcripts with point mutations, such as RAS or TP53 oncogene transcripts, without alteration of the remaining wild-type allele. Finally, by high-throughput sequence analysis of the various genomes, the DNA-based methodology may also be a cost-effective alternative for automated genome-wide loss-of-function phenotypic analysis, especially when combined with miniaturized array-based phenotypic screens. (Ziauddin, J. & Sabatini, D. M. Nature 411:107-110 (2001)).

[0255] The presence of long dsRNAs in cells stimulates the activity of a ribonuclease III enzyme referred to as dicer. Dicer is involved in the processing of the dsRNA into short pieces of dsRNA known as short interfering RNAs (siRNA) (Berstein et al., 2001, Nature, 409:363 (2001)). Short interfering RNAs derived from dicer activity are typically about 21-23 nucleotides in length and comprise about 19 base pair duplexes. Dicer has also been implicated in the excision of 21 and 22 nucleotide small temporal RNAs (stRNA) from precursor RNA of conserved structure that are implicated in translational control (Hutvagner et al., Science, 293, 834 (2001)). The RNAi response also features an endonuclease complex containing a siRNA, commonly referred to as an RNA-induced silencing complex (RISC), which mediates cleavage of single stranded RNA having sequence homologous to the siRNA. Cleavage of the target RNA takes place in the middle of the region complementary to the guide sequence of the siRNA duplex (Elbashir et al., Genes Dev., 15, 188 (2001)).

[0256] This invention provides an expression system comprising an isolated nucleic acid molecule comprising a sequence capable of specifically hybridizing to the CA sequences. In an embodiment, the nucleic acid molecule is capable of inhibiting the expression of the CA protein. A method of inhibiting expression of CA inside a cell by a vector-directed expression of a short RNA which short RNA can fold in itself and create a double strand RNA having CA mRNA sequence identity and able to trigger posttranscriptional gene silencing, or RNA interference (RNAi), of the CA gene inside the cell. In another method a short double strand RNA having CA mRNA sequence identity is delivered inside the cell to trigger posttranscriptional gene silencing, or RNAi, of the CA gene. In various embodiments, the nucleic acid molecule is at least a 7 mer, at least a 10 mer, or at least a 20 mer. In a further embodiment, the sequence is unique.

### (c) Pharmaceutical Compositions

[0257] Pharmaceutical compositions encompassed by the present invention include as active agent, the polypeptides, polynucleotides, antisense oligonucleotides, or antibodies of the invention disclosed herein in a therapeutically effective amount. An “effective amount” is an amount sufficient to effect beneficial or desired results, including clinical results. An effective amount can be administered in one or more administrations. For purposes of this invention, an effective amount of an adenoviral vector is an amount that is sufficient to palliate, ameliorate, stabilize, reverse, slow or delay the progression of the disease state.

[0258] The compositions can be used to treat cancer as well as metastases of primary cancer. In addition, the pharmaceutical compositions can be used in conjunction with conventional methods of cancer treatment, e.g., to sensitize tumors to radiation or conventional chemotherapy. The terms “treatment”, “treating”, “treat” and the like are used herein to generally refer to obtaining a desired pharmacologic and/or physiologic effect. The effect may be prophylactic in terms of completely or partially preventing a disease or symptom thereof and/or may be therapeutic in terms of a partial or complete stabilization or cure for a disease and/or adverse effect attributable to the disease. “Treatment” as used herein covers any treatment of a disease in a mammal, particularly a human, and includes: (a) preventing the disease or symptom from occurring in a subject which may be predisposed to the disease or symptom but has not yet been diagnosed as having it; (b) inhibiting the disease symptom, i.e., arresting its development; or (c) relieving the disease symptom, i.e., causing regression of the disease or symptom.

[0259] Where the pharmaceutical composition comprises an antibody that specifically binds to a gene product encoded by a differentially expressed polynucleotide, the antibody can be coupled to a drug for delivery to a treatment site or coupled to a detectable label to facilitate imaging of a site comprising cancer cells, such as prostate cancer cells. Methods for coupling antibodies to drugs and detectable labels are well known in the art, as are methods for imaging using detectable labels.

[0260] A “patient” for the purposes of the present invention includes both humans and other animals, particularly mammals, and organisms. Thus the methods are applicable to both human therapy and veterinary applications. In the preferred embodiment the patient is a mammal, and in the most preferred embodiment the patient is human.

[0261] The term “therapeutically effective amount” as used herein refers to an amount of a therapeutic agent to treat, ameliorate, or prevent a desired disease or condition, or to exhibit a detectable therapeutic or preventative effect. The effect can be detected by, for example, chemical markers or antigen levels. Therapeutic effects also include reduction in physical symptoms, such as decreased body temperature. The precise effective amount for a subject will depend upon the subject's size and health, the nature and extent of the condition, and the therapeutics or combination of therapeutics selected for administration. The effective amount for a given situation is determined by routine experimentation and is within the judgment of the clinician. For purposes of the present invention, an effective dose will generally be from about 0.01 mg/kg to about 5 mg/kg, or about 0.01 mg/kg to about 50 mg/kg or about 0.05 mg/kg to about 10 mg/kg of the compositions of the present invention in the individual to which it is administered.

[0262] A pharmaceutical composition can also contain a pharmaceutically acceptable carrier. The term “pharmaceutically acceptable carrier” refers to a carrier for administration of a therapeutic agent, such as antibodies or a polypeptide, genes, and other therapeutic agents. The term refers to any pharmaceutical carrier that does not itself induce the production of antibodies harmful to the individual receiving the composition, and which can be administered without undue toxicity. Suitable carriers can be large, slowly metabolized macromolecules such as proteins, polysaccharides, polylactic acids, polyglycolic acids, polymeric amino acids, amino acid copolymers, and inactive virus particles. Such carriers are well known to those of ordinary skill in the art. Pharmaceutically acceptable carriers in therapeutic compositions can include liquids such as water, saline, glycerol and ethanol. Auxiliary substances, such as wetting or emulsifying agents, pH buffering substances, and the like, can also be present in such vehicles. Typically, the therapeutic compositions are prepared as injectables, either as liquid solutions or suspensions; solid forms suitable for solution in, or suspension in, liquid vehicles prior to injection can also be prepared. Liposomes are included within the definition of a pharmaceutically acceptable carrier. Pharmaceutically acceptable salts can also be present in the pharmaceutical composition, e.g., mineral acid salts such as hydrochlorides, hydrobromides, phosphates, sulfates, and the like; and the salts of organic acids such as acetates, propionates, malonates, benzoates, and the like. A thorough discussion of pharmaceutically acceptable excipients is available in Remington: The Science and Practice of Pharmacy (1995) Alfonso Gennaro, Lippincott, Williams, & Wilkins.

[0263] The pharmaceutical compositions can be prepared in various forms, such as granules, tablets, pills, suppositories, capsules, suspensions, salves, lotions and the like. Pharmaceutical grade organic or inorganic carriers and/or diluents suitable for oral and topical use can be used to make up compositions containing the therapeutically-active compounds. Diluents known to the art include aqueous media, vegetable and animal oils and fats. Stabilizing agents, wetting and emulsifying agents, salts for varying the osmotic pressure or buffers for securing an adequate pH value, and skin penetration enhancers can be used as auxiliary agents.

[0264] The pharmaceutical compositions of the present invention comprise a CA protein in a form suitable for administration to a patient. In the preferred embodiment, the pharmaceutical compositions are in a water soluble form, such as being present as pharmaceutically acceptable salts, which is meant to include both acid and base addition salts. “Pharmaceutically acceptable acid addition salt” refers to those salts that retain the biological effectiveness of the free bases and that are not biologically or otherwise undesirable, formed with inorganic acids such as hydrochloric acid, hydrobromic acid, sulfuric acid, nitric acid, phosphoric acid and the like, and organic acids such as acetic acid, propionic acid, glycolic acid, pyruvic acid, oxalic acid, maleic acid, malonic acid, succinic acid, fumaric acid, tartaric acid, citric acid, benzoic acid, cinnamic acid, mandelic acid, methanesulfonic acid, ethanesulfonic acid, p-toluenesulfonic acid, salicylic acid and the like. “Pharmaceutically acceptable base addition salts” include those derived from inorganic bases such as sodium, potassium, lithium, ammonium, calcium, magnesium, iron, zinc, copper, manganese, aluminum salts and the like. Particularly preferred are the ammonium, potassium, sodium, calcium, and magnesium salts. Salts derived from pharmaceutically acceptable organic non-toxic bases include salts of primary, secondary, and tertiary amines, substituted amines including naturally occurring substituted amines, cyclic amines and basic ion exchange resins, such as isopropylamine, trimethylamine, diethylamine, triethylamine, tripropylamine, and ethanol amine.

[0265] The pharmaceutical compositions may also include one or more of the following: carrier proteins such as serum albumin; buffers; fillers such as microcrystalline cellulose, lactose, corn and other starches; binding agents; sweeteners and other flavoring agents; coloring agents; and polyethylene glycol. Additives are well known in the art, and are used in a variety of formulations.

[0266] The compounds having the desired pharmacological activity may be administered in a physiologically acceptable carrier to a host, as previously described. The agents may be administered in a variety of ways, orally, parenterally e.g., subcutaneously, intraperitoneally, intravascularly, etc. Depending upon the manner of introduction, the compounds may be formulated in a variety of ways. The concentration of therapeutically active compound in the formulation may vary from about 0.1-100% wgt/vol. Once formulated, the compositions contemplated by the invention can be (1) administered directly to the subject (e.g., as polynucleotide, polypeptides, small molecule agonists or antagonists, and the like); or (2) delivered ex vivo, to cells derived from the subject (e.g., as in ex vivo gene therapy). Direct delivery of the compositions will generally be accomplished by parenteral injection, e.g., subcutaneously, intraperitoneally, intravenously or intramuscularly, intratumoral or to the interstitial space of a tissue. Other modes of administration include oral and pulmonary administration, suppositories, and transdermal applications, needles, and gene guns or hyposprays. Dosage treatment can be a single dose schedule or a multiple dose schedule.

[0267] Methods for the ex vivo delivery and reimplantation of transformed cells into a subject are known in the art and described in e.g., International Publication No. WO 93/14778. Examples of cells useful in ex vivo applications include, for example, stem cells, particularly hematopoetic, lymph cells, macrophages, dendritic cells, or tumor cells. Generally, delivery of nucleic acids for both ex vivo and in vitro applications can be accomplished by, for example, dextran-mediated transfection, calcium phosphate precipitation, polybrene mediated transfection, protoplast fusion, electroporation, encapsulation of the polynucleotide(s) in liposomes, and direct microinjection of the DNA into nuclei, all well known in the art.

[0268] Once differential expression of a gene corresponding to a CA polynucleotide described herein has been found to correlate with a proliferative disorder, such as neoplasia, dysplasia, and hyperplasia, the disorder can be amenable to treatment by administration of a therapeutic agent based on the provided polynucleotide, corresponding polypeptide or other corresponding molecule (e.g., antisense, ribozyme, etc.). In other embodiments, the disorder can be amenable to treatment by administration of a small molecule drug that, for example, serves as an inhibitor (antagonist) of the function of the encoded gene product of a gene having increased expression in cancerous cells relative to normal cells or as an agonist for gene products that are decreased in expression in cancerous cells (e.g., to promote the activity of gene products that act as tumor suppressors).

[0269] The dose and the means of administration of the inventive pharmaceutical compositions are determined based on the specific qualities of the therapeutic composition, the condition, age, and weight of the patient, the progression of the disease, and other relevant factors. For example, administration of polynucleotide therapeutic compositions agents includes local or systemic administration, including injection, oral administration, particle gun or catheterized administration, and topical administration. Preferably, the therapeutic polynucleotide composition contains an expression construct comprising a promoter operably linked to a polynucleotide of at least 12, 22, 25, 30, or 35 contiguous nt of the polynucleotide disclosed herein. Various methods can be used to administer the therapeutic composition directly to a specific site in the body. For example, a small metastatic lesion is located and the therapeutic composition injected several times in several different locations within the body of tumor. Alternatively, arteries that serve a tumor are identified, and the therapeutic composition injected into such an artery, in order to deliver the composition directly into the tumor. A tumor that has a necrotic center is aspirated and the composition injected directly into the now empty center of the tumor. An antisense composition is directly administered to the surface of the tumor, for example, by topical application of the composition. X-ray imaging is used to assist in certain of the above delivery methods.

[0270] Targeted delivery of therapeutic compositions containing an antisense polynucleotide, subgenomic polynucleotides, or antibodies to specific tissues can also be used. Receptor-mediated DNA delivery techniques are described in, for example, Findeis et al., Trends Biotechnol. (1993) 11:202; Chiou et al., Gene Therapeutics: Methods And Applications Of Direct Gene Transfer (J. A. Wolff, ed.) (1994); Wu et al., J. Biol. Chem. (1988) 263:621; Wu et al., J. Biol. Chem. (1994) 269:542; Zenke et al., Proc. Natl. Acad. Sci. (USA) (1990) 87:3655; Wu et al., J. Biol. Chem. (1991) 266:338. Therapeutic compositions containing a polynucleotide are administered in a range of about 100 ng to about 200 mg of DNA for local administration in a gene therapy protocol. Concentration ranges of about 500 ng to about 50 mg, about 1 μg to about 2 mg, about 5 μg to about 500 μg, and about 20 μg to about 100 μg of DNA can also be used during a gene therapy protocol. Factors such as method of action (e.g., for enhancing or inhibiting levels of the encoded gene product) and efficacy of transformation and expression are considerations that will affect the dosage required for ultimate efficacy of the antisense subgenomic polynucleotides. Where greater expression is desired over a larger area of tissue, larger amounts of antisense subgenomic polynucleotides or the same amounts re-administered in a successive protocol of administrations, or several administrations to different adjacent or close tissue portions of, for example, a tumor site, may be required to effect a positive therapeutic outcome. In all cases, routine experimentation in clinical trials will determine specific ranges for optimal therapeutic effect.

[0271] The therapeutic polynucleotides and polypeptides of the present invention can be delivered using gene delivery vehicles. The gene delivery vehicle can be of viral or non-viral origin (see generally, Jolly, Cancer Gene Therapy (1994) 1:51; Kimura, Human Gene Therapy (1994) 5:845; Connelly, Human Gene Therapy (1995) 1:185; and Kaplitt, Nature Genetics (1994) 6:148). Expression of such coding sequences can be induced using endogenous mammalian or heterologous promoters. Expression of the coding sequence can be either constitutive or regulated.

[0272] Viral-based vectors for delivery of a desired polynucleotide and expression in a desired cell are well known in the art. Exemplary viral-based vehicles include, but are not limited to, recombinant retroviruses (see, e.g., WO 90/07936; WO 94/03622; WO 93/25698; WO 93/25234; U.S. Pat. No. 5,219,740; WO 93/11230; WO 93/10218; U.S. Pat. No. 4,777,127; GB Patent No. 2,200,651; EP 0 345 242; and WO 91/02805), alphavirus-based vectors (e.g., Sindbis virus vectors, Semliki forest virus (ATCC VR-67; ATCC VR-1247), Ross River virus (ATCC VR-373; ATCC VR-1246) and Venezuelan equine encephalitis virus (ATCC VR-923; ATCC VR-1250; ATCC VR 1249; ATCC VR-532)), and adeno-associated virus (AAV) vectors (see, e.g., WO 94/12649, WO 93/03769; WO 93/19191; WO 94/28938; WO 95/11984 and WO 95/00655). Administration of DNA linked to killed adenovirus as described in Curiel, Hum. Gene Ther. (1992) 3:147 can also be employed.

[0273] Non-viral delivery vehicles and methods can also be employed, including, but not limited to, polycationic condensed DNA linked or unlinked to killed adenovirus alone (see, e.g., Curiel, Hum. Gene Ther. (1992) 3:147); ligand-linked DNA (see, e.g., Wu, J. Biol. Chem. (1989) 264:16985); eukaryotic cell delivery vehicles cells (see, e.g., U.S. Pat. No. 5,814,482; WO 95/07994; WO 96/17072; WO 95/30763; and WO 97/42338) and nucleic charge neutralization or fusion with cell membranes. Naked DNA can also be employed. Exemplary naked DNA introduction methods are described in WO 90/11092 and U.S. Pat. No. 5,580,859. Liposomes that can act as gene delivery vehicles are described in U.S. Pat. No. 5,422,120; WO 95/13796; WO 94/23697; WO 91/14445; and EP 0524968. Additional approaches are described in Philip, Mol. Cell. Biol. (1994) 14:2411, and in Woffendin, Proc. Natl. Acad. Sci. (1994) 91:1581.

[0274] Further non-viral delivery suitable for use includes mechanical delivery systems such as the approach described in Woffendin et al., Proc. Natl. Acad. Sci. USA (1994) 91(24): 11581. Moreover, the coding sequence and the product of expression of such can be delivered through deposition of photopolymerized hydrogel materials or use of ionizing radiation (see, e.g., U.S. Pat. No. 5,206,152 and WO 92/11033). Other conventional methods for gene delivery that can be used for delivery of the coding sequence include, for example, use of hand-held gene transfer particle gun (see, e.g., U.S. Pat. No. 5,149,655); use of ionizing radiation for activating transferred gene (see, e.g., U.S. Pat. No. 5,206,152 and WO 92/11033).

[0275] The administration of the CA proteins and modulators of the present invention can be done in a variety of ways as discussed above, including, but not limited to, orally, subcutaneously, intravenously, intranasally, transdermally, intraperitoneally, intramuscularly, intrapulmonary, vaginally, rectally, or intraocularly. In some instances, for example, in the treatment of wounds and inflammation, the CA proteins and modulators may be directly applied as a solution or spray.

[0276] In a preferred embodiment, CA proteins and modulators are administered as therapeutic agents, and can be formulated as outlined above. Similarly, CA genes (including both the full-length sequence, partial sequences, or regulatory sequences of the CA coding regions) can be administered in gene therapy applications, as is known in the art. These CA genes can include antisense applications, either as gene therapy (i.e. for incorporation into the genome) or as antisense compositions, as will be appreciated by those in the art.

[0277] Thus, in one embodiment, methods of modulating CA gene activity in cells or organisms are provided. In one embodiment, the methods comprise administering to a cell an anti-CA antibody that reduces or eliminates the biological activity of an endogenous CA protein. Alternatively, the methods comprise administering to a cell or organism a recombinant nucleic acid encoding a CA protein. As will be appreciated by those in the art, this may be accomplished in any number of ways. In a preferred embodiment, for example when the CA sequence is down-regulated in cancer, the activity of the CA gene product is increased by increasing the amount of CA expression in the cell, for example by overexpressing the endogenous CA gene or by administering a gene encoding the CA sequence, using known gene-therapy techniques. In a preferred embodiment, the gene therapy techniques include the incorporation of the exogenous gene using enhanced homologous recombination (EHR), for example as described in PCT/US93/03868, hereby incorporated by reference in its entirety. Alternatively, for example when the CA sequence is up-regulated in cancer, the activity of the endogenous CA gene is decreased, for example by the administration of a CA antisense nucleic acid.

### (d) Vaccines

[0278] In a preferred embodiment, CA genes are administered as DNA vaccines, either single genes or combinations of CA genes. Naked DNA vaccines are generally known in the art. Brower, Nature Biotechnology, 16:1304-1305 (1998).

[0279] In one embodiment, CA genes of the present invention are used as DNA vaccines. Methods for the use of genes as DNA vaccines are well known to one of ordinary skill in the art, and include placing a CA gene or portion of a CA gene under the control of a promoter for expression in a patient with cancer. The CA gene used for DNA vaccines can encode full-length CA proteins, but more preferably encodes portions of the CA proteins including peptides derived from the CA protein. In a preferred embodiment a patient is immunized with a DNA vaccine comprising a plurality of nucleotide sequences derived from a CA gene. Similarly, it is possible to immunize a patient with a plurality of CA genes or portions thereof. Without being bound by theory, expression of the polypeptide encoded by the DNA vaccine, cytotoxic T-cells, helper T-cells and antibodies are induced that recognize and destroy or eliminate cells expressing CA proteins.

[0280] In a preferred embodiment, the DNA vaccines include a gene encoding an adjuvant molecule with the DNA vaccine. Such adjuvant molecules include cytokines that increase the immunogenic response to the CA polypeptide encoded by the DNA vaccine. Additional or alternative adjuvants are known to those of ordinary skill in the art and find use in the invention.

### (e) Antibodies

[0281] In one embodiment, a cancer inhibitor is an antibody as discussed above. In one embodiment, the CA proteins of the present invention may be used to generate polyclonal and monoclonal antibodies to CA proteins, which are useful as described herein. Similarly, the CA proteins can be coupled, using standard technology, to affinity chromatography columns. These columns may then be used to purify CA antibodies. In a preferred embodiment, the antibodies are generated to epitopes unique to a CA protein; that is, the antibodies show little or no cross-reactivity to other proteins. These antibodies find use in a number of applications. For example, the CA antibodies may be coupled to standard affinity chromatography columns and used to purify CA proteins. The antibodies may also be used therapeutically as blocking polypeptides, as outlined above, since they will specifically bind to the CA protein.

[0282] The present invention further provides methods for detecting the presence of and/or measuring a level of a polypeptide in a biological sample, which CA polypeptide is encoded by a CA polynucleotide that is differentially expressed in a cancer cell, using an antibody specific for the encoded polypeptide. The methods generally comprise: a) contacting the sample with an antibody specific for a polypeptide encoded by a CA polynucleotide that is differentially expressed in a prostate cancer cell; and b) detecting binding between the antibody and molecules of the sample.

[0283] Detection of specific binding of the antibody specific for the encoded cancer-associated polypeptide, when compared to a suitable control is an indication that encoded polypeptide is present in the sample. Suitable controls include a sample known not to contain the encoded CA polypeptide or known not to contain elevated levels of the polypeptide; such as normal tissue, and a sample contacted with an antibody not specific for the encoded polypeptide, e.g., an anti-idiotype antibody. A variety of methods to detect specific antibody-antigen interactions are known in the art and can be used in the method, including, but not limited to, standard immunohistological methods, immunoprecipitation, an enzyme immunoassay, and a radioimmunoassay. In general, the specific antibody will be detectably labeled, either directly or indirectly. Direct labels include radioisotopes; enzymes whose products are detectable (e.g., luciferase, β-galactosidase, and the like); fluorescent labels (e.g., fluorescein isothiocyanate, rhodamine, phycoerythrin, and the like); fluorescence emitting metals, e.g., ¹⁵²Eu, or others of the lanthanide series, attached to the antibody through metal chelating groups such as EDTA; chemiluminescent compounds, e.g., luminol, isoluminol, acridinium salts, and the like; bioluminescent compounds, e.g., luciferin, aequorin (green fluorescent protein), and the like. The antibody may be attached (coupled) to an insoluble support, such as a polystyrene plate or a bead. Indirect labels include second antibodies specific for antibodies specific for the encoded polypeptide (“first specific antibody”), wherein the second antibody is labeled as described above; and members of specific binding pairs, e.g., biotin-avidin, and the like. The biological sample may be brought into contact with and immobilized on a solid support or carrier, such as nitrocellulose, that is capable of immobilizing cells, cell particles, or soluble proteins. The support may then be washed with suitable buffers, followed by contacting with a detectably-labeled first specific antibody. Detection methods are known in the art and will be chosen as appropriate to the signal emitted by the detectable label. Detection is generally accomplished in comparison to suitable controls, and to appropriate standards.

[0284] In some embodiments, the methods are adapted for use in vivo, e.g., to locate or identify sites where cancer cells are present. In these embodiments, a detectably-labeled moiety, e.g., an antibody, which is specific for a cancer-associated polypeptide is administered to an individual (e.g., by injection), and labeled cells are located using standard imaging techniques, including, but not limited to, magnetic resonance imaging, computed tomography scanning, and the like. In this manner, cancer cells are differentially labeled.

### (f) Detection and Diagnosis of Cancers

[0285] Without being bound by theory, it appears that the various CA sequences are important in cancers. Accordingly, disorders based on mutant or variant CA genes may be determined. In one embodiment, the invention provides methods for identifying cells containing variant CA genes comprising determining all or part of the sequence of at least one endogenous CA genes in a cell. As will be appreciated by those in the art, this may be done using any number of sequencing techniques. In a preferred embodiment, the invention provides methods of identifying the CA genotype of an individual comprising determining all or part of the sequence of at least one CA gene of the individual. This is generally done in at least one tissue of the individual, and may include the evaluation of a number of tissues or different samples of the same tissue. The method may include comparing the sequence of the sequenced CA gene to a known CA gene, i.e., a wild-type gene. As will be appreciated by those in the art, alterations in the sequence of some CA genes can be an indication of either the presence of the disease, or propensity to develop the disease, or prognosis evaluations.

[0286] The sequence of all or part of the CA gene can then be compared to the sequence of a known CA gene to determine if any differences exist. This can be done using any number of known homology programs, such as Bestfit, etc. In a preferred embodiment, the presence of a difference in the sequence between the CA gene of the patient and the known CA gene is indicative of a disease state or a propensity for a disease state, as outlined herein.

[0287] In a preferred embodiment, the CA genes are used as probes to determine the number of copies of the CA gene in the genome. For example, some cancers exhibit chromosomal deletions or insertions, resulting in an alteration in the copy number of a gene.

[0288] In another preferred embodiment CA genes are used as probes to determine the chromosomal location of the CA genes. Information such as chromosomal location finds use in providing a diagnosis or prognosis in particular when chromosomal abnormalities such as translocations, and the like are identified in CA gene loci.

[0289] The present invention provides methods of using the polynucleotides described herein for detecting cancer cells, facilitating diagnosis of cancer and the severity of a cancer (e.g., tumor grade, tumor burden, and the like) in a subject, facilitating a determination of the prognosis of a subject, and assessing the responsiveness of the subject to therapy (e.g., by providing a measure of therapeutic effect through, for example, assessing tumor burden during or following a chemotherapeutic regimen). Detection can be based on detection of a polynucleotide that is differentially expressed in a cancer cell, and/or detection of a polypeptide encoded by a polynucleotide that is differentially expressed in a cancer cell. The detection methods of the invention can be conducted in vitro or in vivo, on isolated cells, or in whole tissues or a bodily fluid e.g., blood, plasma, serum, urine, and the like).

[0290] In some embodiments, methods are provided for detecting a cancer cell by detecting expression in the cell of a transcript that is differentially expressed in a cancer cell. Any of a variety of known methods can be used for detection, including, but not limited to, detection of a transcript by hybridization with a polynucleotide that hybridizes to a polynucleotide that is differentially expressed in a prostate cancer cell; detection of a transcript by a polymerase chain reaction using specific oligonucleotide primers; in situ hybridization of a cell using as a probe a polynucleotide that hybridizes to a gene that is differentially expressed in a prostate cancer cell. The methods can be used to detect and/or measure mRNA levels of a gene that is differentially expressed in a cancer cell. In some embodiments, the methods comprise: a) contacting a sample with a polynucleotide that corresponds to a differentially expressed gene described herein under conditions that allow hybridization; and b) detecting hybridization, if any.

[0291] Detection of differential hybridization, when compared to a suitable control, is an indication of the presence in the sample of a polynucleotide that is differentially expressed in a cancer cell. Appropriate controls include, for example, a sample that is known not to contain a polynucleotide that is differentially expressed in a cancer cell, and use of a labeled polynucleotide of the same “sense” as the polynucleotide that is differentially expressed in the cancer cell. Conditions that allow hybridization are known in the art, and have been described in more detail above. Detection can also be accomplished by any known method, including, but not limited to, in situ hybridization, PCR (polymerase chain reaction), RT-PCR (reverse transcription-PCR), TMA, bDNA, and Nasbau and “Northern” or RNA blotting, or combinations of such techniques, using a suitably labeled polynucleotide. A variety of labels and labeling methods for polynucleotides are known in the art and can be used in the assay methods of the invention. Specificity of hybridization can be determined by comparison to appropriate controls.

[0292] Polynucleotides generally comprising at least 10 nt, at least 12 nt or at least 15 contiguous nucleotides of a polynucleotide provided herein, such as, for example, those having the sequence as depicted in Tables 1-21, are used for a variety of purposes, such as probes for detection of and/or measurement of, transcription levels of a polynucleotide that is differentially expressed in a prostate cancer cell. As will be readily appreciated by the ordinarily skilled artisan, the probe can be detectably labeled and contacted with, for example, an array comprising immobilized polynucleotides obtained from a test sample (e.g., mRNA). Alternatively, the probe can be immobilized on an array and the test sample detectably labeled. These and other variations of the methods of the invention are well within the skill in the art and are within the scope of the invention.

[0293] Nucleotide probes are used to detect expression of a gene corresponding to the provided polynucleotide. In Northern blots, mRNA is separated electrophoretically and contacted with a probe. A probe is detected as hybridizing to an mRNA species of a particular size. The amount of hybridization can be quantitated to determine relative amounts of expression, for example under a particular condition. Probes are used for in situ hybridization to cells to detect expression. Probes can also be used in vivo for diagnostic detection of hybridizing sequences. Probes are typically labeled with a radioactive isotope. Other types of detectable labels can be used such as chromophores, fluorophores, and enzymes. Other examples of nucleotide hybridization assays are described in WO92/02526 and U.S. Pat. No. 5,124,246.

[0294] PCR is another means for detecting small amounts of target nucleic acids (see, e.g., Mullis et al., Meth. Enzymol. (1987) 155:335; U.S. Pat. No. 4,683,195; and U.S. Pat. No. 4,683,202). Two primer oligonucleotides that hybridize with the target nucleic acids are used to prime the reaction. The primers can be composed of sequence within or 3′ and 5′ to the CA polynucleotides disclosed herein. Alternatively, if the primers are 3′ and 5′ to these polynucleotides, they need not hybridize to them or the complements. After amplification of the target with a thermostable polymerase, the amplified target nucleic acids can be detected by methods known in the art, e.g., Southern blot. mRNA or cDNA can also be detected by traditional blotting techniques (e.g., Southern blot, Northern blot, etc.) described in Sambrook et al., “Molecular Cloning: A Laboratory Manual” (New York, Cold Spring Harbor Laboratory, 1989) (e.g., without PCR amplification). In general, mRNA or cDNA generated from mRNA using a polymerase enzyme can be purified and separated using gel electrophoresis, and transferred to a solid support, such as nitrocellulose. The solid support is exposed to a labeled probe, washed to remove any unhybridized probe, and duplexes containing the labeled probe are detected.

[0295] Methods using PCR amplification can be performed on the DNA from a single cell, although it is convenient to use at least about 10⁵ cells. The use of the polymerase chain reaction is described in Saiki et al. (1985) Science 239:487, and a review of current techniques may be found in Sambrook, et al. Molecular Cloning: A Laboratory Manual, CSH Press 1989, pp. 14.2-14.33. A detectable label may be included in the amplification reaction. Suitable detectable labels include fluorochromes, (e.g. fluorescein isothiocyanate (FITC), rhodamine, Texas Red, phycoerythrin, allophycocyanin, 6-carboxyfluorescein (6-FAM), 2′,7′-dimethoxy-4′,5′-dichloro-6-carboxyfluorescein, 6-carboxy-X-rhodamine (ROX), 6-carboxy-2′,4′,7′,4,7-hexachlorofluorescein (HEX), 5-carboxyfluorescein (5-FAM) or N,N,N′,N′-tetramethyl-6-carboxyrhodamine (TAMRA)), radioactive labels, (e.g. ³²P, ³⁵S, ³H, etc.), and the like. The label may be a two stage system, where the polynucleotides is conjugated to biotin, haptens, etc. having a high affinity binding partner, e.g. avidin, specific antibodies, etc., where the binding partner is conjugated to a detectable label. The label may be conjugated to one or both of the primers. Alternatively, the pool of nucleotides used in the amplification is labeled, so as to incorporate the label into the amplification product.

[0296] The detection methods can be provided as part of a kit. Thus, the invention further provides kits for detecting the presence and/or a level of a polynucleotide that is differentially expressed in a cancer cell (e.g., by detection of an mRNA encoded by the differentially expressed gene of interest), and/or a polypeptide encoded thereby, in a biological sample. Procedures using these kits can be performed by clinical laboratories, experimental laboratories, medical practitioners, or private individuals. The kits of the invention for detecting a polypeptide encoded by a polynucleotide that is differentially expressed in a cancer cell may comprise a moiety that specifically binds the polypeptide, which may be an antibody that binds the polypeptide or fragment thereof. The kits of the invention used for detecting a polynucleotide that is differentially expressed in a prostate cancer cell may comprise a moiety that specifically hybridizes to such a polynucleotide. The kit may optionally provide additional components that are useful in the procedure, including, but not limited to, buffers, developing reagents, labels, reacting surfaces, means for detection, control samples, standards, instructions, and interpretive information. Accordingly, the present invention provides kits for detecting prostate cancer comprising at least one of polynucleotides having the sequence as shown in Tables 1-21 or fragments thereof.

[0297] The present invention further relates to methods of detecting/diagnosing a neoplastic or preneoplastic condition in a mammal (for example, a human). “Diagnosis” as used herein generally includes determination of a subject's susceptibility to a disease or disorder, determination as to whether a subject is presently affected by a disease or disorder, prognosis of a subject affected by a disease or disorder (e.g., identification of pre-metastatic or metastatic cancerous states, stages of cancer, or responsiveness of cancer to therapy), and therametrics (e.g., monitoring a subject's condition to provide information as to the effect or efficacy of therapy).

[0298] The terms “treatment”, “treating”, “treat” and the like are used herein to generally refer to obtaining a desired pharmacologic and/or physiologic effect. The effect may be prophylactic in terms of completely or partially preventing a disease or symptom thereof and/or may be therapeutic in terms of a partial or complete stabilization or cure for a disease and/or adverse effect attributable to the disease. “Treatment” as used herein covers any treatment of a disease in a mammal, particularly a human, and includes: (a) preventing the disease or symptom from occurring in a subject which may be predisposed to the disease or symptom but has not yet been diagnosed as having it; (b) inhibiting the disease symptom, i.e., arresting its development; or (c) relieving the disease symptom, i.e., causing regression of the disease or symptom.

[0299] An “effective amount” is an amount sufficient to effect beneficial or desired results, including clinical results. An effective amount can be administered in one or more administrations.

[0300] A “cell sample” encompasses a variety of sample types obtained from an individual and can be used in a diagnostic or monitoring assay. The definition encompasses blood and other liquid samples of biological origin, solid tissue samples such as a biopsy specimen or tissue cultures or cells derived therefrom, and the progeny thereof. The definition also includes samples that have been manipulated in any way after their procurement, such as by treatment with reagents, solubilization, or enrichment for certain components, such as proteins or polynucleotides. The term “cell sample” encompasses a clinical sample, and also includes cells in culture, cell supernatants, cell lysates, serum, plasma, biological fluid, and tissue samples.

[0301] As used herein, the terms “neoplastic cells”, “neoplasia”, “tumor”, “tumor cells”, “cancer” and “cancer cells”, (used interchangeably) refer to cells which exhibit relatively autonomous growth, so that they exhibit an aberrant growth phenotype characterized by a significant loss of control of cell proliferation (i.e., de-regulated cell division). Neoplastic cells can be malignant or benign.

[0302] The terms “individual,” “subject,” “host,” and “patient,” are used interchangeably herein and refer to any mammalian subject for whom diagnosis, treatment, or therapy is desired, particularly humans. Other subjects may include cattle, dogs, cats, guinea pigs, rabbits, rats, mice, horses, and so on. Examples of conditions that can be detected/diagnosed in accordance with these methods include cancers. Polynucleotides corresponding to genes that exhibit the appropriate expression pattern can be used to detect cancer in a subject. For a review of markers of cancer, see, e.g., Hanahan et al. Cell 100:57-70 (2000).

[0303] One detection/diagnostic method comprises: (a) obtaining from a mammal (e.g., a human) a biological sample, (b) detecting the presence in the sample of a CA protein and (c) comparing the amount of product present with that in a control sample. In accordance with this method, the presence in the sample of elevated levels of a CA gene product indicates that the subject has a neoplastic or preneoplastic condition.

[0304] Biological samples suitable for use in this method include biological fluids such as serum, plasma, pleural effusions, urine and cerebro-spinal fluid, CSF, tissue samples (e.g., mammary tumor or prostate tissue slices) can also be used in the method of the invention, including samples derived from biopsies. Cell cultures or cell extracts derived, for example, from tissue biopsies can also be used.

[0305] The compound is preferably a binding protein, e.g., an antibody, polyclonal or monoclonal, or antigen binding fragment thereof, which can be labeled with a detectable marker (e.g., fluorophore, chromophore or isotope, etc). Where appropriate, the compound can be attached to a solid support such as a bead, plate, filter, resin, etc. Determination of formation of the complex can be effected by contacting the complex with a further compound (e.g., an antibody) that specifically binds to the first compound (or complex). Like the first compound, the further compound can be attached to a solid support and/or can be labeled with a detectable marker.

[0306] The identification of elevated levels of CA protein in accordance with the present invention makes possible the identification of subjects (patients) that are likely to benefit from adjuvant therapy. For example, a biological sample from a post primary therapy subject (e.g., subject having undergone surgery) can be screened for the presence of circulating CA protein, the presence of elevated levels of the protein, determined by studies of normal populations, being indicative of residual tumor tissue. Similarly, tissue from the cut site of a surgically removed tumor can be examined (e.g., by immunofluorescence), the presence of elevated levels of product (relative to the surrounding tissue) being indicative of incomplete removal of the tumor. The ability to identify such subjects makes it possible to tailor therapy to the needs of the particular subject. Subjects undergoing non-surgical therapy, e.g., chemotherapy or radiation therapy, can also be monitored, the presence in samples from such subjects of elevated levels of CA protein being indicative of the need for continued treatment. Staging of the disease (for example, for purposes of optimizing treatment regimens) can also be effected, for example, by biopsy e.g., with antibody specific for a CA protein.

### (g) Animal Models and Transgenics

[0307] In another preferred embodiment CA genes find use in generating animal models of cancers, particularly lymphomas and carcinomas. As is appreciated by one of ordinary skill in the art, when the CA gene identified is repressed or diminished in CA tissue, gene therapy technology wherein antisense RNA directed to the CA gene will also diminish or repress expression of the gene. An animal generated as such serves as an animal model of CA that finds use in screening bioactive drug candidates. Similarly, gene knockout technology, for example as a result of homologous recombination with an appropriate gene targeting vector, will result in the absence of the CA protein. When desired, tissue-specific expression or knockout of the CA protein may be necessary.

[0308] It is also possible that the CA protein is overexpressed in cancer. As such, transgenic animals can be generated that overexpress the CA protein. Depending on the desired expression level, promoters of various strengths can be employed to express the transgene. Also, the number of copies of the integrated transgene can be determined and compared for a determination of the expression level of the transgene. Animals generated by such methods find use as animal models of CA and are additionally useful in screening for bioactive molecules to treat cancer.

Characterization of CA sequences

[0309] The CA nucleic acid sequences of the invention are depicted in Tables 1-21. The sequences in each Table include genomic DNA sequence (mouse genomic sequences mDxx-yyy; human genomic sequences hDxx-yyy), sequence corresponding to the mRNA(s) generated therefrom (mRxx-yyy; hrxx-yyy) and amino acid sequences of the proteins (mPxx-yyy; hpxx-yyy) encoded by the mRNA for both mouse and human genes. N/A indicates a gene that has been identified, but for which there has not been a name ascribed.

[0310] The mouse and human genomic DNA sequence, sequence corresponding to the mRNA(s) generated therefrom and amino acid sequences of the proteins as shown in Tables 1-21 are described according to SEQ ID NOS as follows in Table 22.

TABLE 22

| DESIGNATION | SEQ ID NO | TYPE OF SEQUENCE |
|---|---|---|
| mD19-003 | SEQ ID NO: 1 | MOUSE GENOMIC SEQUENCE |
| mR19-003.1 | SEQ ID NO: 2 | MOUSE mRNA SEQUENCE |
| mP19-003.1 | SEQ ID NO: 3 | MOUSE PROTEIN SEQUENCE |
| hD19-003 | SEQ ID NO: 4 | HUMAN GENOMIC SEQUENCE |
| hR19-003.1 | SEQ ID NO: 5 | HUMAN mRNA SEQUENCE |
| hP19-003.1 | SEQ ID NO: 6 | HUMAN PROTEIN SEQUENCE |
| hR19-003.2 | SEQ ID NO: 7 | HUMAN mRNA SEQUENCE |
| hP19-003.2 | SEQ ID NO: 8 | HUMAN PROTEIN SEQUENCE |
| hR19-003.3 | SEQ ID NO: 9 | HUMAN mRNA SEQUENCE |
| hP19-003.3 | SEQ ID NO: 10 | HUMAN PROTEIN SEQUENCE |
| mD20-002 | SEQ ID NO: 11 | MOUSE GENOMIC SEQUENCE |
| mR20-002.1 | SEQ ID NO: 12 | MOUSE mRNA SEQUENCE |
| mP20-002.1 | SEQ ID NO: 13 | MOUSE PROTEIN SEQUENCE |
| mD20-009 | SEQ ID NO: 14 | MOUSE GENOMIC SEQUENCE |
| mR20-009.1 | SEQ ID NO: 15 | MOUSE mRNA SEQUENCE |
| mP20-009.1 | SEQ ID NO: 16 | MOUSE PROTEIN SEQUENCE |
| hD20-009 | SEQ ID NO: 17 | HUMAN GENOMIC SEQUENCE |
| hR20-009.1 | SEQ ID NO: 18 | HUMAN mRNA SEQUENCE |
| hP20-009.1 | SEQ ID NO: 19 | HUMAN PROTEIN SEQUENCE |
| hR20-009.2 | SEQ ID NO: 20 | HUMAN mRNA SEQUENCE |
| hP20-009.2 | SEQ ID NO: 21 | HUMAN PROTEIN SEQUENCE |
| hR20-009.3 | SEQ ID NO: 22 | HUMAN mRNA SEQUENCE |
| hP20-009.3 | SEQ ID NO: 23 | HUMAN PROTEIN SEQUENCE |
| hR20-009.4 | SEQ ID NO: 24 | HUMAN mRNA SEQUENCE |
| hP20-009.4 | SEQ ID NO: 25 | HUMAN PROTEIN SEQUENCE |
| mD20-006 | SEQ ID NO: 26 | MOUSE GENOMIC SEQUENCE |
| mR20-006.1 | SEQ ID NO: 27 | MOUSE mRNA SEQUENCE |
| mP20-006.1 | SEQ ID NO: 28 | MOUSE PROTEIN SEQUENCE |
| mD20-008 | SEQ ID NO: 29 | MOUSE GENOMIC SEQUENCE |
| mR20-008.1 | SEQ ID NO: 30 | MOUSE mRNA SEQUENCE |
| mP20-008.1 | SEQ ID NO: 31 | MOUSE PROTEIN SEQUENCE |
| hD20-008 | SEQ ID NO: 32 | HUMAN GENOMIC SEQUENCE |
| hR20-008.1 | SEQ ID NO: 33 | HUMAN mRNA SEQUENCE |
| hP20-008.1 | SEQ ID NO: 34 | HUMAN PROTEIN SEQUENCE |
| hR20-008.2 | SEQ ID NO: 35 | HUMAN mRNA SEQUENCE |
| hP20-008.2 | SEQ ID NO: 36 | HUMAN PROTEIN SEQUENCE |
| hR20-008.3 | SEQ ID NO: 37 | HUMAN mRNA SEQUENCE |
| hP20-008.3 | SEQ ID NO: 38 | HUMAN PROTEIN SEQUENCE |
| mD20-010 | SEQ ID NO: 39 | MOUSE GENOMIC SEQUENCE |
| mR20-010.1 | SEQ ID NO: 40 | MOUSE mRNA SEQUENCE |
| mP20-010.1 | SEQ ID NO: 41 | MOUSE PROTEIN SEQUENCE |
| hD20-010 | SEQ ID NO: 42 | HUMAN GENOMIC SEQUENCE |
| hR20-010.1 | SEQ ID NO: 43 | HUMAN mRNA SEQUENCE |
| hP20-010.1 | SEQ ID NO: 44 | HUMAN PROTEIN SEQUENCE |
| hR20-010.2 | SEQ ID NO: 45 | HUMAN mRNA SEQUENCE |
| hP20-010.2 | SEQ ID NO: 46 | HUMAN PROTEIN SEQUENCE |
| mD20-024 | SEQ ID NO: 47 | MOUSE GENOMIC SEQUENCE |
| mR20-024.1 | SEQ ID NO: 48 | MOUSE mRNA SEQUENCE |
| mP20-024.1 | SEQ ID NO: 49 | MOUSE PROTEIN SEQUENCE |
| hD20-024 | SEQ ID NO: 50 | HUMAN GENOMIC SEQUENCE |
| hR20-024.1 | SEQ ID NO: 51 | HUMAN mRNA SEQUENCE |
| hP20-024.1 | SEQ ID NO: 52 | HUMAN PROTEIN SEQUENCE |
| hR20-024.2 | SEQ ID NO: 53 | HUMAN mRNA SEQUENCE |
| hP20-024.2 | SEQ ID NO: 54 | HUMAN PROTEIN SEQUENCE |
| mD20-029 | SEQ ID NO: 55 | MOUSE GENOMIC SEQUENCE |
| mR20-029.1 | SEQ ID NO: 56 | MOUSE mRNA SEQUENCE |
| mP20-029.1 | SEQ ID NO: 57 | MOUSE PROTEIN SEQUENCE |
| hD20-029 | SEQ ID NO: 58 | HUMAN GENOMIC SEQUENCE |
| hR20-029.1 | SEQ ID NO: 59 | HUMAN mRNA SEQUENCE |
| hP20-029.1 | SEQ ID NO: 60 | HUMAN PROTEIN SEQUENCE |
| mD20-030 | SEQ ID NO: 61 | MOUSE GENOMIC SEQUENCE |
| mR20-030.1 | SEQ ID NO: 62 | MOUSE mRNA SEQUENCE |
| mP20-030.1 | SEQ ID NO: 63 | MOUSE PROTEIN SEQUENCE |
| mR20-030.2 | SEQ ID NO: 64 | MOUSE mRNA SEQUENCE |
| mP20-030.2 | SEQ ID NO: 65 | MOUSE PROTEIN SEQUENCE |
| mR20-030.3 | SEQ ID NO: 66 | MOUSE mRNA SEQUENCE |
| mP20-030.3 | SEQ ID NO: 67 | MOUSE PROTEIN SEQUENCE |
| mR20-030.4 | SEQ ID NO: 68 | MOUSE mRNA SEQUENCE |
| mP20-030.4 | SEQ ID NO: 69 | MOUSE PROTEIN SEQUENCE |
| mR20-030.5 | SEQ ID NO: 70 | MOUSE mRNA SEQUENCE |
| mP20-030.5 | SEQ ID NO: 71 | MOUSE PROTEIN SEQUENCE |
| mR20-030.6 | SEQ ID NO: 72 | MOUSE mRNA SEQUENCE |
| mP20-030.6 | SEQ ID NO: 73 | MOUSE PROTEIN SEQUENCE |
| hD20-030 | SEQ ID NO: 74 | HUMAN GENOMIC SEQUENCE |
| hR20-030.1 | SEQ ID NO: 75 | HUMAN mRNA SEQUENCE |
| hP20-030.1 | SEQ ID NO: 76 | HUMAN PROTEIN SEQUENCE |
| hD21-002 | SEQ ID NO: 77 | HUMAN GENOMIC SEQUENCE |
| hR21-002.1 | SEQ ID NO: 78 | HUMAN mRNA SEQUENCE |
| hP21-002.1 | SEQ ID NO: 79 | HUMAN PROTEIN SEQUENCE |
| hR21-002.2 | SEQ ID NO: 80 | HUMAN mRNA SEQUENCE |
| hP21-002.2 | SEQ ID NO: 81 | HUMAN PROTEIN SEQUENCE |
| hR21-002.3 | SEQ ID NO: 82 | HUMAN mRNA SEQUENCE |
| hP21-002.3 | SEQ ID NO: 83 | HUMAN PROTEIN SEQUENCE |
| mD21-008 | SEQ ID NO: 84 | MOUSE GENOMIC SEQUENCE |
| mR21-008.1 | SEQ ID NO: 85 | MOUSE mRNA SEQUENCE |
| mP21-008.1 | SEQ ID NO: 86 | MOUSE PROTEIN SEQUENCE |
| hD21-008 | SEQ ID NO: 87 | HUMAN GENOMIC SEQUENCE |
| hR21-008.1 | SEQ ID NO: 88 | HUMAN mRNA SEQUENCE |
| hP21-008.1 | SEQ ID NO: 89 | HUMAN PROTEIN SEQUENCE |
| hR21-008.2 | SEQ ID NO: 90 | HUMAN mRNA SEQUENCE |
| hP21-008.2 | SEQ ID NO: 91 | HUMAN PROTEIN SEQUENCE |
| hR21-008.3 | SEQ ID NO: 92 | HUMAN mRNA SEQUENCE |
| hP21-008.3 | SEQ ID NO: 93 | HUMAN PROTEIN SEQUENCE |
| hR21-008.4 | SEQ ID NO: 94 | HUMAN mRNA SEQUENCE |
| hP21-008.4 | SEQ ID NO: 95 | HUMAN PROTEIN SEQUENCE |
| mD21-009 | SEQ ID NO: 96 | MOUSE GENOMIC SEQUENCE |
| mR21-009.1 | SEQ ID NO: 97 | MOUSE mRNA SEQUENCE |
| mP21-009.1 | SEQ ID NO: 98 | MOUSE PROTEIN SEQUENCE |
| hD21-009 | SEQ ID NO: 99 | HUMAN GENOMIC SEQUENCE |
| hR21-009.1 | SEQ ID NO: 100 | HUMAN mRNA SEQUENCE |
| hP21-009.1 | SEQ ID NO: 101 | HUMAN PROTEIN SEQUENCE |
| hR21-009.2 | SEQ ID NO: 102 | HUMAN mRNA SEQUENCE |
| hP21-009.2 | SEQ ID NO: 103 | HUMAN PROTEIN SEQUENCE |
| mD21-014 | SEQ ID NO: 104 | MOUSE GENOMIC SEQUENCE |
| mR21-014.1 | SEQ ID NO: 105 | MOUSE mRNA SEQUENCE |
| mP21-014.1 | SEQ ID NO: 106 | MOUSE PROTEIN SEQUENCE |
| mD21-015 | SEQ ID NO: 107 | MOUSE GENOMIC SEQUENCE |
| mR21-015.1 | SEQ ID NO: 108 | MOUSE mRNA SEQUENCE |
| mP21-015.1 | SEQ ID NO: 109 | MOUSE PROTEIN SEQUENCE |
| mR21-015.2 | SEQ ID NO: 110 | MOUSE mRNA SEQUENCE |
| mP21-015.2 | SEQ ID NO: 111 | MOUSE PROTEIN SEQUENCE |
| hD21-015 | SEQ ID NO: 112 | HUMAN GENOMIC SEQUENCE |
| hR21-015.1 | SEQ ID NO: 113 | HUMAN mRNA SEQUENCE |
| hP21-015.1 | SEQ ID NO: 114 | HUMAN PROTEIN SEQUENCE |
| hR21-015.2 | SEQ ID NO: 115 | HUMAN mRNA SEQUENCE |
| hP21-015.2 | SEQ ID NO: 116 | HUMAN PROTEIN SEQUENCE |
| mD21-020 | SEQ ID NO: 117 | MOUSE GENOMIC SEQUENCE |
| mR21-020.1 | SEQ ID NO: 118 | MOUSE mRNA SEQUENCE |
| mP21-020.1 | SEQ ID NO: 119 | MOUSE PROTEIN SEQUENCE |
| mR21-020.2 | SEQ ID NO: 120 | MOUSE mRNA SEQUENCE |
| mP21-020.2 | SEQ ID NO: 121 | MOUSE PROTEIN SEQUENCE |
| hD21-020 | SEQ ID NO: 122 | HUMAN GENOMIC SEQUENCE |
| hR21-020.1 | SEQ ID NO: 123 | HUMAN mRNA SEQUENCE |
| hP21-020.1 | SEQ ID NO: 124 | HUMAN PROTEIN SEQUENCE |
| mD21-024 | SEQ ID NO: 125 | MOUSE GENOMIC SEQUENCE |
| mR21-024.1 | SEQ ID NO: 126 | MOUSE mRNA SEQUENCE |
| mP21-024.1 | SEQ ID NO: 127 | MOUSE PROTEIN SEQUENCE |
| mR21-024.2 | SEQ ID NO: 128 | MOUSE mRNA SEQUENCE |
| mP21-024.2 | SEQ ID NO: 129 | MOUSE PROTEIN SEQUENCE |
| mR21-024.3 | SEQ ID NO: 130 | MOUSE mRNA SEQUENCE |
| mP21-024.3 | SEQ ID NO: 131 | MOUSE PROTEIN SEQUENCE |
| mR21-024.4 | SEQ ID NO: 132 | MOUSE mRNA SEQUENCE |
| mP21-024.4 | SEQ ID NO: 133 | MOUSE PROTEIN SEQUENCE |
| mR21-024.5 | SEQ ID NO: 134 | MOUSE mRNA SEQUENCE |
| mP21-024.5 | SEQ ID NO: 135 | MOUSE PROTEIN SEQUENCE |
| mR21-024.6 | SEQ ID NO: 136 | MOUSE mRNA SEQUENCE |
| mP21-024.6 | SEQ ID NO: 137 | MOUSE PROTEIN SEQUENCE |
| mD21-025 | SEQ ID NO: 138 | MOUSE GENOMIC SEQUENCE |
| mR21-025.1 | SEQ ID NO: 139 | MOUSE mRNA SEQUENCE |
| mP21-025.1 | SEQ ID NO: 140 | MOUSE PROTEIN SEQUENCE |
| mR21-025.2 | SEQ ID NO: 141 | MOUSE mRNA SEQUENCE |
| mP21-025.2 | SEQ ID NO: 142 | MOUSE PROTEIN SEQUENCE |
| mR21-025.3 | SEQ ID NO: 143 | MOUSE mRNA SEQUENCE |
| mP21-025.3 | SEQ ID NO: 144 | MOUSE PROTEIN SEQUENCE |
| hD21-025 | SEQ ID NO: 145 | HUMAN GENOMIC SEQUENCE |
| hR21-025.1 | SEQ ID NO: 146 | HUMAN mRNA SEQUENCE |
| hP21-025.1 | SEQ ID NO: 147 | HUMAN PROTEIN SEQUENCE |
| hR21-025.2 | SEQ ID NO: 148 | HUMAN mRNA SEQUENCE |
| hP21-025.2 | SEQ ID NO: 149 | HUMAN PROTEIN SEQUENCE |
| hR21-025.3 | SEQ ID NO: 150 | HUMAN mRNA SEQUENCE |
| hP21-025.3 | SEQ ID NO: 151 | HUMAN PROTEIN SEQUENCE |
| hR21-025.4 | SEQ ID NO: 152 | HUMAN mRNA SEQUENCE |
| hP21-025.4 | SEQ ID NO: 153 | HUMAN PROTEIN SEQUENCE |
| hR21-025.5 | SEQ ID NO: 154 | HUMAN mRNA SEQUENCE |
| hP21-025.5 | SEQ ID NO: 155 | HUMAN PROTEIN SEQUENCE |
| hR21-025.6 | SEQ ID NO: 156 | HUMAN mRNA SEQUENCE |
| hP21-025.6 | SEQ ID NO: 157 | HUMAN PROTEIN SEQUENCE |
| hR21-025.7 | SEQ ID NO: 158 | HUMAN mRNA SEQUENCE |
| hP21-025.7 | SEQ ID NO: 159 | HUMAN PROTEIN SEQUENCE |
| mD21-028 | SEQ ID NO: 160 | MOUSE GENOMIC SEQUENCE |
| mR21-028.1 | SEQ ID NO: 161 | MOUSE mRNA SEQUENCE |
| mP21-028.1 | SEQ ID NO: 162 | MOUSE PROTEIN SEQUENCE |
| hD21-028 | SEQ ID NO: 163 | HUMAN GENOMIC SEQUENCE |
| hR21-028.1 | SEQ ID NO: 164 | HUMAN mRNA SEQUENCE |
| hP21-028.1 | SEQ ID NO: 165 | HUMAN PROTEIN SEQUENCE |
| mD21-029 | SEQ ID NO: 166 | MOUSE GENOMIC SEQUENCE |
| mR21-029.1 | SEQ ID NO: 167 | MOUSE mRNA SEQUENCE |
| mP21-029.1 | SEQ ID NO: 168 | MOUSE PROTEIN SEQUENCE |
| hD21-029 | SEQ ID NO: 169 | HUMAN GENOMIC SEQUENCE |
| hR21-029.1 | SEQ ID NO: 170 | HUMAN mRNA SEQUENCE |
| hP21-029.1 | SEQ ID NO: 171 | HUMAN PROTEIN SEQUENCE |
| hR21-029.2 | SEQ ID NO: 172 | HUMAN mRNA SEQUENCE |
| hP21-029.2 | SEQ ID NO: 173 | HUMAN PROTEIN SEQUENCE |
| mD21-036 | SEQ ID NO: 174 | MOUSE GENOMIC SEQUENCE |
| mR21-036.1 | SEQ ID NO: 175 | MOUSE mRNA SEQUENCE |
| mP21-036.1 | SEQ ID NO: 176 | MOUSE PROTEIN SEQUENCE |
| hD21-036 | SEQ ID NO: 177 | HUMAN GENOMIC SEQUENCE |
| hR21-036.1 | SEQ ID NO: 178 | HUMAN mRNA SEQUENCE |
| hP21-036.1 | SEQ ID NO: 179 | HUMAN PROTEIN SEQUENCE |
| hR21-036.2 | SEQ ID NO: 180 | HUMAN mRNA SEQUENCE |
| hP21-036.2 | SEQ ID NO: 181 | HUMAN PROTEIN SEQUENCE |
| mD21-037 | SEQ ID NO: 182 | MOUSE GENOMIC SEQUENCE |
| mR21-037.1 | SEQ ID NO: 183 | MOUSE mRNA SEQUENCE |
| mP21-037.1 | SEQ ID NO: 184 | MOUSE PROTEIN SEQUENCE |
| hD21-037 | SEQ ID NO: 185 | HUMAN GENOMIC SEQUENCE |
| hR21-037.1 | SEQ ID NO: 186 | HUMAN mRNA SEQUENCE |
| hP21-037.1 | SEQ ID NO: 187 | HUMAN PROTEIN SEQUENCE |
| hR21-037.2 | SEQ ID NO: 188 | HUMAN mRNA SEQUENCE |
| hP21-037.2 | SEQ ID NO: 189 | HUMAN PROTEIN SEQUENCE |
| hR21-037.3 | SEQ ID NO: 190 | HUMAN mRNA SEQUENCE |
| hP21-037.3 | SEQ ID NO: 191 | HUMAN PROTEIN SEQUENCE |

[0311] The CA sequences were analyzed by Panther™ (Molecular Diagnostics, Palo Alto, Calif.) software designed to detect homologs and enable prediction of molecular function through a system for protein functional classification. Human Gene Ontlogy annotations were prepared in accordance with the Gene Ontology Consortium (Gene Ontology: tool for the unification of biology. The Gene Ontology Consortium Nature Genet. 25: 25-29 (2000)). Similar analysis was carried out by determining IPR information regarding the CA polypeptides from InterPro, which is an integrated documentation resource for protein families, domains and functional sites (Apweiler at al. Bioinformatics 16(12): 1145-1150 (2000)).

[0312] The CA sequences may be classified according to the following predicted general classifications of function by Panther™ analysis, human gene ontology and IPR domain information for polypeptides having SEQ ID NOS: 6, 8, 10, 19, 21, 23, 25, 34, 36, 38, 44, 46, 52, 54, 60, 76, 79, 81, 83, 89, 91, 93, 95, 101, 103, 114, 116, 124, 147, 149, 151, 153, 155, 157, 159, 165, 171, 173, 179, 181, 187, 189, and 191 as shown in Tables 1-21. The classifications are shown in Table 23 below.

TABLE 23

| Human Protein | SEQ ID NO: | FUNCTION |
|---|---|---|
| hP19-003.1 | SEQ ID NO: 6 | HUMAN PANTHER CLASSIFICATIONS |
| | | FAMILY (SUBFAMILY) |
| | | PROSTAGLANDIN RECEPTOR- |
| | | RELATED(PROSTAGLANDIN E2 RECEPTOR, EP2 |
| | | SUBTYPE) |
| | | BIOLOGICAL PROCESS |
| | | Signal transduction(2.11.00.00.00) > Cell |
| | | surface receptor mediated signal |
| | | transduction(2.11.01.00.00) > G-protein mediated |
| | | signaling(2.11.01.07.00) |
| | | Immunity and defense(2.16.00.00.00) |
| | | MOLECULAR FUNCTIONS |
| | | Receptor(1.01.00.00.00) > G-protein |
| | | coupled receptor(1.01.01.00.00) |
| | | HUMAN GENE ONTOLOGY |
| | | BIOLOGICAL PROCESS |
| | | cell surface receptor linked signal |
| | | transduction > G protein linked receptor protein signaling |
| | | pathway |
| | | G protein linked receptor protein |
| | | signaling pathway > G protein signaling, linked to cyclic |
| | | nucleotide second messenger |
| | | cell communication > cell-cell signaling |
| | | MOLECULAR FUNCTION |
| | | enzyme > nitric oxide synthase |
| | | CELL COMPONENT |
| | | cell > membrane fraction |
| | | plasma membrane > integral plasma |
| | | membrane protein |
| | | HUMAN PROTEIN DOMAINS (INTERPRO |
| | | SIGNATURES) |
| | | IPR000276 (7tm 1) |
| | | IPR000276 (G PROTEIN RECEP F1 2) |
| hP19-003.2 | SEQ ID NO: 8 | HUMAN PANTHER CLASSIFICATIONS |
| | | FAMILY (SUBFAMILY) |
| | | PROSTAGLANDIN RECEPTOR- |
| | | RELATED(PROSTAGLANDIN E2 RECEPTOR, EP2 |
| | | SUBTYPE) |
| | | BIOLOGICAL PROCESS |
| | | Signal transduction(2.11.00.00.00) > Cell |
| | | surface receptor mediated signal |
| | | transduction(2.11.01.00.00) > G-protein mediated |
| | | signaling(2.11.01.07.00) |
| | | Immunity and defense(2.16.00.00.00) |
| | | MOLECULAR FUNCTIONS |
| | | Receptor(1.01.00.00.00) > G-protein |
| | | coupled receptor(1.01.01.00.00) |
| | | HUMAN GENE ONTOLOGY |
| | | BIOLOGICAL PROCESS |
| | | cell surface receptor linked signal |
| | | transduction > G protein linked receptor protein signaling |
| | | pathway |
| | | G protein linked receptor protein |
| | | signaling pathway > G protein signaling, linked to cyclic |
| | | nucleotide second messenger |
| | | cell communication > cell-cell signaling |
| | | MOLECULAR FUNCTION |
| | | enzyme > nitric oxide synthase |
| | | CELL COMPONENT |
| | | cell > membrane fraction |
| | | plasma membrane > integral plasma |
| | | membrane protein |
| | | HUMAN PROTEIN DOMAINS (INTERPRO |
| | | SIGNATURES) |
| | | IPR001923 (PRSTNOIDEP2R) |
| | | IPR000276 (7tm 1) |
| | | IPR000276 (G PROTEIN RECEP F1 2) |
| hP19-003.3 | SEQ ID NO: 10 | HUMAN PANTHER CLASSIFICATIONS |
| | | FAMILY (SUBFAMILY) |
| | | PROSTAGLANDIN RECEPTOR- |
| | | RELATED(PROSTAGLANDIN E2 RECEPTOR, EP2 |
| | | SUBTYPE) |
| | | BIOLOGICAL PROCESS |
| | | Signal transduction(2.11.00.00.00) > Cell |
| | | surface receptor mediated signal |
| | | transduction(2.11.01.00.00) > G-protein mediated |
| | | signaling(2.11.01.07.00) |
| | | Immunity and defense(2.16.00.00.00) |
| | | MOLECULAR FUNCTIONS |
| | | Receptor(1.01.00.00.00) > G-protein |
| | | coupled receptor(1.01.01.00.00) |
| | | HUMAN GENE ONTOLOGY |
| | | BIOLOGICAL PROCESS |
| | | cell surface receptor linked signal |
| | | transduction > G protein linked receptor protein signaling |
| | | pathway |
| | | G protein linked receptor protein |
| | | signaling pathway > G protein signaling, linked to cyclic |
| | | nucleotide second messenger |
| | | cell communication > cell-cell signaling |
| | | MOLECULAR FUNCTION |
| | | enzyme > nitric oxide synthase |
| | | CELL COMPONENT |
| | | cell > membrane fraction |
| | | plasma membrane > integral plasma |
| | | membrane protein |
| | | HUMAN PROTEIN DOMAINS (INTERPRO |
| | | SIGNATURES) |
| | | IPR001923 (PRSTNOIDEP2R) |
| | | IPR000276 (7tm 1) |
| | | IPR000276 (G PROTEIN RECEP F1 2) |
| hP20-009.1 | SEQ ID NO: 19 | HUMAN PANTHER CLASSIFICATIONS |
| | | FAMILY (SUBFAMILY) |
| | | BIOGENIC AMINE RECEPTORS(5- |
| | | HYDROXYTRYPTAMINE 7 RECEPTOR) |
| | | BIOLOGICAL PROCESS |
| | | Signal transduction(2.11.00.00.00) > Cell |
| | | surface receptor mediated signal |
| | | transduction(2.11.01.00.00) > G-protein mediated |
| | | signaling(2.11.01.07.00) |
| | | Neuronal activities(2.18.00.00.00) |
| | | MOLECULAR FUNCTIONS |
| | | Receptor(1.01.00.00.00) > G-protein |
| | | coupled receptor(1.01.01.00.00) |
| | | HUMAN GENE ONTOLOGY |
| | | BIOLOGICAL PROCESS |
| | | G protein linked receptor protein |
| | | signaling pathway > G protein signaling, linked to cyclic |
| | | nucleotide second messenger |
| | | cell-cell signaling > synaptic |
| | | transmission |
| | | rhythmic behavior > circadian rhythm |
| | | G protein signaling, adenylate cyclase |
| | | inhibiting pathway > dopamine receptor, adenylate |
| | | cyclase inhibiting pathway |
| | | MOLECULAR FUNCTION |
| | | amine oxidase > amine oxidase (flavin- |
| | | containing) |
| | | CELL COMPONENT |
| | | cell > membrane fraction |
| | | plasma membrane > integral plasma |
| | | membrane protein |
| | | HUMAN PROTEIN DOMAINS (INTERPRO |
| | | SIGNATURES) |
| | | IPR000276 (GPCRRHODOPSN) |
| | | IPR002231 (5HTRECEPTOR) |
| | | IPR001069 (5HT7RECEPTR) |
| | | IPR000276 (7tm 1) |
| | | IPR000276 (G PROTEIN RECEP F1 2) |
| hP20-009.2 | SEQ ID NO: 21 | HUMAN PANTHER CLASSIFICATIONS |
| | | FAMILY (SUBFAMILY) |
| | | BIOGENIC AMINE RECEPTORS(5- |
| | | HYDROXYTRYPTAMINE 7 RECEPTOR) |
| | | BIOLOGICAL PROCESS |
| | | Signal transduction(2.11.00.00.00) > Cell |
| | | surface receptor mediated signal |
| | | transduction(2.11.01.00.00) > G-protein mediated |
| | | signaling(2.11.01.07.00) |
| | | Neuronal activities(2.18.00.00.00) |
| | | MOLECULAR FUNCTIONS |
| | | Receptor(1.01.00.00.00) > G-protein |
| | | coupled receptor(1.01.01.00.00) |
| | | HUMAN GENE ONTOLOGY |
| | | BIOLOGICAL PROCESS |
| | | G protein linked receptor protein |
| | | signaling pathway > G protein signaling, linked to cyclic |
| | | nucleotide second messenger |
| | | cell-cell signaling > synaptic |
| | | transmission |
| | | rhythmic behavior > circadian rhythm |
| | | G protein signaling, adenylate cyclase |
| | | inhibiting pathway > dopamine receptor, adenylate |
| | | cyclase inhibiting pathway |
| | | MOLECULAR FUNCTION |
| | | amine oxidase > amine oxidase (flavin- |
| | | containing) |
| | | CELL COMPONENT |
| | | plasma membrane > integral plasma |
| | | membrane protein |
| | | cell > membrane fraction |
| | | HUMAN PROTEIN DOMAINS (INTERPRO |
| | | SIGNATURES) |
| | | IPR000276 (GPCRRHODOPSN) |
| | | IPR000276 (7tm 1) |
| | | IPR000276 (G PROTEIN RECEP F1 2) |
| hP20-009.3 | SEQ ID NO: 23 | HUMAN PANTHER CLASSIFICATIONS |
| | | FAMILY (SUBFAMILY) |
| | | BIOGENIC AMINE RECEPTORS(5- |
| | | HYDROXYTRYPTAMINE 7 RECEPTOR) |
| | | BIOLOGICAL PROCESS |
| | | Signal transduction(2.11.00.00.00) > Cell |
| | | surface receptor mediated signal |
| | | transduction(2.11.01.00.00) > G-protein mediated |
| | | signaling(2.11.01.07.00) |
| | | Neuronal activities(2.18.00.00.00) |
| | | MOLECULAR FUNCTIONS |
| | | Receptor(1.01.00.00.00) > G-protein |
| | | coupled receptor(1.01.01.00.00) |
| | | HUMAN GENE ONTOLOGY |
| | | BIOLOGICAL PROCESS |
| | | G protein linked receptor protein |
| | | signaling pathway > G protein signaling, linked to cyclic |
| | | nucleotide second messenger |
| | | cell-cell signaling > synaptic |
| | | transmission |
| | | rhythmic behavior > circadian rhythm |
| | | G protein signaling, adenylate cyclase |
| | | inhibiting pathway > dopamine receptor, adenylate |
| | | cyclase inhibiting pathway |
| | | MOLECULAR FUNCTION |
| | | amine oxidase > amine oxidase (flavin- |
| | | containing) |
| | | CELL COMPONENT |
| | | plasma membrane > integral plasma |
| | | membrane protein |
| | | cell > membrane fraction |
| | | HUMAN PROTEIN DOMAINS (INTERPRO |
| | | SIGNATURES) |
| | | IPR000276 (GPCRRHODOPSN) |
| | | IPR002231 (5HTRECEPTOR) |
| | | IPR001069 (5HT7RECEPTR) |
| | | IPR000276 (7tm 1) |
| | | IPR000276 (G PROTEIN RECEP F1 2) |
| hP20-009.4 | SEQ ID NO: 25 | HUMAN PANTHER CLASSIFICATIONS |
| | | FAMILY (SUBFAMILY) |
| | | BIOGENIC AMINE RECEPTORS(5- |
| | | HYDROXYTRYPTAMINE 7 RECEPTOR) |
| | | BIOLOGICAL PROCESS |
| | | Signal transduction(2.11.00.00.00) > Cell |
| | | surface receptor mediated signal |
| | | transduction(2.11.01.00.00) > G-protein mediated |
| | | signaling(2.11.01.07.00) |
| | | Neuronal activities(2.18.00.00.00) |
| | | MOLECULAR FUNCTIONS |
| | | Receptor(1.01.00.00.00) > G-protein |
| | | coupled receptor(1.01.01.00.00) |
| | | HUMAN GENE ONTOLOGY |
| | | BIOLOGICAL PROCESS |
| | | G protein linked receptor protein |
| | | signaling pathway > G protein signaling, linked to cyclic |
| | | nucleotide second messenger |
| | | cell-cell signaling > synaptic |
| | | transmission |
| | | rhythmic behavior > circadian rhythm |
| | | G protein signaling, adenylate cyclase |
| | | inhibiting pathway > dopamine receptor, adenylate |
| | | cyclase inhibiting pathway |
| | | MOLECULAR FUNCTION |
| | | amine oxidase > amine oxidase (flavin- |
| | | containing) |
| | | CELL COMPONENT |
| | | cell > membrane fraction |
| | | plasma membrane > integral plasma |
| | | membrane protein |
| | | HUMAN PROTEIN DOMAINS (INTERPRO |
| | | SIGNATURES) |
| | | IPR000276 (GPCRRHODOPSN) |
| | | IPR002231 (5HTRECEPTOR) |
| | | IPR001069 (5HT7RECEPTR) |
| | | IPR000276 (7tm 1) |
| | | IPR000276 (G PROTEIN RECEP F1 2) |
| hP20-008.1 | SEQ ID NO: 34 | HUMAN PANTHER CLASSIFICATIONS |
| | | FAMILY (SUBFAMILY) |
| | | SULFATE |
| | | ADENYLYLTRANSFERASE(BIFUNCTIONAL |
| | | 3&apos;-PHOSPHOADENOSINE 5&apos;- |
| | | PHOSPHOSULFATE SYNTHETHASE) |
| | | BIOLOGICAL PROCESS |
| | | Sulfur metabolism(2.10.00.00.00) |
| | | MOLECULAR FUNCTIONS |
| | | Kinase(1.15.00.00.00) > Other |
| | | kinase(1.15.99.00.00) |
| | | Transferase(1.20.00.00.00) > Nucleotidyltransferase |
| | | (1.20.01.00.00) |
| | | HUMAN GENE ONTOLOGY |
| | | BIOLOGICAL PROCESS |
| | | mesoderm development > skeletal |
| | | development |
| | | metabolism > nucleobase, nucleoside, |
| | | nucleotide and nucleic acid metabolism |
| | | sulfur utilization > sulfate assimilation |
| | | amino-acid metabolism > methionine |
| | | metabolism |
| | | aspartate family amino-acid metabolism > methionine |
| | | metabolism |
| | | sulfur amino-acid metabolism > methionine |
| | | metabolism |
| | | protein biosynthesis > protein synthesis |
| | | elongation |
| | | MOLECULAR FUNCTION |
| | | enzyme > adenylsulfate kinase |
| | | nucleotide binding > ATP binding |
| | | poly-pyrimidine tract binding > translation |
| | | elongation factor |
| | | nucleotide binding > GTP binding |
| | | CELL COMPONENT |
| | | GO cellular component > cellular_component |
| | | unknown |
| | | mitochondrion > mitochondrial matrix |
| | | HUMAN PROTEIN DOMAINS (INTERPRO |
| | | SIGNATURES) |
| | | IPR002650 (ATP-sulfurylase) |
| | | IPR002650 (sp Q9P0G6 Q9P0G6 |
| | | HUMAN) |
| hP20-008.2 | SEQ ID NO: 36 | HUMAN PANTHER CLASSIFICATIONS |
| | | FAMILY (SUBFAMILY) |
| | | SULFATE |
| | | ADENYLYLTRANSFERASE(BIFUNCTIONAL |
| | | 3&apos;-PHOSPHOADENOSINE 5&apos;- |
| | | PHOSPHOSULFATE SYNTHETHASE) |
| | | BIOLOGICAL PROCESS |
| | | Sulfur metabolism(2.10.00.00.00) |
| | | MOLECULAR FUNCTIONS |
| | | Kinase(1.15.00.00.00) > Other |
| | | kinase(1.15.99.00.00) |
| | | Transferase(1.20.00.00.00) > Nucleotidyltransferase |
| | | (1.20.01.00.00) |
| | | HUMAN GENE ONTOLOGY |
| | | BIOLOGICAL PROCESS |
| | | mesoderm development > skeletal |
| | | development |
| | | metabolism > nucleobase, nucleoside, |
| | | nucleotide and nucleic acid metabolism |
| | | sulfur utilization > sulfate assimilation |
| | | amino-acid metabolism > methionine |
| | | metabolism |
| | | aspartate family amino-acid metabolism > methionine |
| | | metabolism |
| | | sulfur amino-acid metabolism > methionine |
| | | metabolism |
| | | protein biosynthesis > protein synthesis |
| | | elongation |
| | | MOLECULAR FUNCTION |
| | | enzyme > adenylsulfate kinase |
| | | nucleotide binding > ATP binding |
| | | poly-pyrimidine tract binding > translation |
| | | elongation factor |
| | | nucleotide binding > GTP binding |
| | | CELL COMPONENT |
| | | GO cellular component > cellular_component |
| | | unknown |
| | | mitochondrion > mitochondrial matrix |
| | | HUMAN PROTEIN DOMAINS (INTERPRO |
| | | SIGNATURES) |
| | | IPR002650 (ATP-sulfurylase) |
| | | IPR002891 (APS kinase) |
| | | IPR002650 (sp Q9UHM1 Q9UHM1 |
| | | HUMAN) |
| | | IPR002891 (sp Q9BZL2 Q9BZL2 |
| | | HUMAN) |
| | | IPR002891 (apsK) |
| hP20-008.3 | SEQ ID NO: 38 | HUMAN PANTHER CLASSIFICATIONS |
| | | FAMILY (SUBFAMILY) |
| | | SULFATE |
| | | ADENYLYLTRANSFERASE(BIFUNCTIONAL |
| | | 3&apos;-PHOSPHOADENOSINE 5&apos;- |
| | | PHOSPHOSULFATE SYNTHETHASE) |
| | | BIOLOGICAL PROCESS |
| | | Sulfur metabolism(2.10.00.00.00) |
| | | MOLECULAR FUNCTIONS |
| | | Kinase(1.15.00.00.00) > Other |
| | | kinase(1.15.99.00.00) |
| | | Transferase(1.20.00.00.00) > Nucleotidyltransferase |
| | | (1.20.01.00.00) |
| | | HUMAN GENE ONTOLOGY |
| | | BIOLOGICAL PROCESS |
| | | mesoderm development > skeletal |
| | | development |
| | | metabolism > nucleobase, nucleoside, |
| | | nucleotide and nucleic acid metabolism |
| | | sulfur utilization > sulfate assimilation |
| | | amino-acid metabolism > methionine |
| | | metabolism |
| | | aspartate family amino-acid metabolism > methionine |
| | | metabolism |
| | | sulfur amino-acid metabolism > methionine |
| | | metabolism |
| | | protein biosynthesis > protein synthesis |
| | | elongation |
| | | MOLECULAR FUNCTION |
| | | enzyme > adenylsulfate kinase |
| | | nucleotide binding > ATP binding |
| | | poly-pyrimidine tract binding > translation |
| | | elongation factor |
| | | nucleotide binding > GTP binding |
| | | CELL COMPONENT |
| | | GO cellular component > cellular_component |
| | | unknown |
| | | mitochondrion > mitochondrial matrix |
| | | HUMAN PROTEIN DOMAINS (INTERPRO |
| | | SIGNATURES) |
| | | IPR002650 (ATP-sulfurylase) |
| | | IPR002891 (APS kinase) |
| | | IPR002650 (sp Q9P0G6 Q9P0G6 |
| | | HUMAN) |
| | | IPR002891 (sp Q9BZL2 Q9BZL2 |
| | | HUMAN) |
| | | IPR002891 (apsK) |
| hP20-010.1 | SEQ ID NO: 44 | HUMAN PANTHER CLASSIFICATIONS |
| | | FAMILY (SUBFAMILY) |
| | | CYTOCHROME |
| | | P450(CYTOCHROME P450 26) |
| | | BIOLOGICAL PROCESS |
| | | Developmental processes(2.23.00.00.00) |
| | | MOLECULAR FUNCTIONS |
| | | Oxidoreductase(1.19.00.00.00) > Oxygenase |
| | | (1.19.01.00.00) |
| | | HUMAN GENE ONTOLOGY |
| | | BIOLOGICAL PROCESS |
| | | metabolism > electron transport |
| | | cell growth and maintenance > metabolism |
| | | MOLECULAR FUNCTION |
| | | ligand binding or carrier > electron |
| | | transfer |
| | | monooxygenase > retinoic acid 4- |
| | | hydroxylase |
| | | enzyme > monooxygenase |
| | | CELL COMPONENT |
| | | endoplasmic reticulum > microsome |
| | | cytoplasm > endoplasmic reticulum |
| | | HUMAN PROTEIN DOMAINS (INTERPRO |
| | | SIGNATURES) |
| | | IPR001128 (p450) |
| hP20-010.2 | SEQ ID NO: 46 | HUMAN PANTHER CLASSIFICATIONS |
| | | FAMILY (SUBFAMILY) |
| | | CYTOCHROME |
| | | P450(CYTOCHROME P450 26) |
| | | BIOLOGICAL PROCESS |
| | | Developmental processes(2.23.00.00.00) |
| | | MOLECULAR FUNCTIONS |
| | | Oxidoreductase(1.19.00.00.00) > Oxygenase |
| | | (1.19.01.00.00) |
| | | HUMAN GENE ONTOLOGY |
| | | BIOLOGICAL PROCESS |
| | | metabolism > electron transport |
| | | cell growth and maintenance > metabolism |
| | | MOLECULAR FUNCTION |
| | | ligand binding or carrier > electron |
| | | transfer |
| | | monooxygenase > retinoic acid 4- |
| | | hydroxylase |
| | | enzyme > monooxygenase |
| | | CELL COMPONENT |
| | | endoplasmic reticulum > microsome |
| | | cytoplasm > endoplasmic reticulum |
| | | HUMAN PROTEIN DOMAINS (INTERPRO |
| | | SIGNATURES) |
| | | IPR002403 (EP450IV) |
| | | IPR001128 (p450) |
| hP20-024.1 | SEQ ID NO: 52 | HUMAN PANTHER CLASSIFICATIONS |
| | | FAMILY (SUBFAMILY) |
| | | DNA REPAIR HELICASE- |
| | | RELATED(CHROMODOMAIN-HELICASE-DNA- |
| | | BINDING PROTEIN) |
| | | BIOLOGICAL PROCESS |
| | | Nucleoside, nucleotide and nucleic acid |
| | | metabolism(2.04.00.00.00) > mRNA |
| | | transcription(2.04.04.00.00) > mRNA transcription |
| | | regulation(2.04.04.04.00) |
| | | MOLECULAR FUNCTIONS |
| | | Nucleic acid binding(1.06.00.00.00) > Helicase |
| | | (1.06.08.00.00) > DNA helicase(1.06.08.02.00) |
| | | HUMAN GENE ONTOLOGY |
| | | BIOLOGICAL PROCESS |
| | | transcription regulation > transcription |
| | | regulation from Pol II promoter |
| | | nuclear organization and biogenesis > chromosome |
| | | organization and biogenesis |
| | | DNA packaging > chromatin modelling |
| | | cell growth and maintenance > cell cycle |
| | | cell growth and maintenance > meiosis |
| | | MOLECULAR FUNCTION |
| | | GO molecular function > nucleic acid |
| | | binding |
| | | DNA binding > DNA helicase |
| | | helicase > DNA helicase |
| | | DNA binding > chromatin binding |
| | | DNA dependent adenosinetriphosphatase > ATP |
| | | dependent DNA helicase |
| | | ATP dependent helicase > ATP |
| | | dependent DNA helicase |
| | | DNA helicase > ATP dependent DNA |
| | | helicase |
| | | enzyme > helicase |
| | | CELL COMPONENT |
| | | cell > nucleus |
| | | chromosome > chromatin |
| | | nucleus > nucleoplasm |
| | | nucleus > nucleosome remodelling |
| | | complex |
| | | HUMAN PROTEIN DOMAINS (INTERPRO |
| | | SIGNATURES) |
| | | IPR000953 (CHROMO) |
| | | IPR001410 (DEXDc) |
| | | IPR001650 (HELICc) |
| | | IPR001650 (helicase C) |
| | | IPR000953 (chromo) |
| | | IPR000330 (SNF2 N) |
| | | NULL (SER RICH) |
| | | IPR000953 (CHROMO 2 2) |
| | | NULL (GLU RICH) |
| | | NULL (GLN RICH) |
| hP20-024.2 | SEQ ID NO: 54 | HUMAN PANTHER CLASSIFICATIONS |
| | | FAMILY (SUBFAMILY) |
| | | DNA REPAIR HELICASE- |
| | | RELATED(CHROMODOMAIN-HELICASE-DNA- |
| | | BINDING PROTEIN) |
| | | BIOLOGICAL PROCESS |
| | | Nucleoside, nucleotide and nucleic acid |
| | | metabolism(2.04.00.00.00) > mRNA |
| | | transcription(2.04.04.00.00) > mRNA transcription |
| | | regulation(2.04.04.04.00) |
| | | MOLECULAR FUNCTIONS |
| | | Nucleic acid binding(1.06.00.00.00) > Helicase |
| | | (1.06.08.00.00) > DNA helicase(1.06.08.02.00) |
| | | HUMAN GENE ONTOLOGY |
| | | BIOLOGICAL PROCESS |
| | | transcription regulation > transcription |
| | | regulation from Pol II promoter |
| | | nuclear organization and biogenesis > chromosome |
| | | organization and biogenesis |
| | | DNA packaging > chromatin modelling |
| | | cell growth and maintenance > cell cycle |
| | | cell growth and maintenance > meiosis |
| | | MOLECULAR FUNCTION |
| | | GO molecular function > nucleic acid |
| | | binding |
| | | DNA binding > DNA helicase |
| | | helicase > DNA helicase |
| | | DNA binding > chromatin binding |
| | | DNA dependent adenosinetriphosphatase > ATP |
| | | dependent DNA helicase |
| | | ATP dependent helicase > ATP |
| | | dependent DNA helicase |
| | | DNA helicase > ATP dependent DNA |
| | | helicase |
| | | enzyme > helicase |
| | | CELL COMPONENT |
| | | cell > nucleus |
| | | chromosome > chromatin |
| | | nucleus > nucleoplasm |
| | | nucleus > nucleosome remodelling |
| | | complex |
| | | HUMAN PROTEIN DOMAINS (INTERPRO |
| | | SIGNATURES) |
| | | IPR000953 (CHROMO) |
| | | IPR001410 (DEXDc) |
| | | IPR001650 (HELICc) |
| | | IPR001650 (helicase C) |
| | | IPR000953 (chromo) |
| | | IPR000330 (SNF2 N) |
| | | NULL (SER RICH) |
| | | IPR000953 (CHROMO 2 2) |
| | | NULL (GLU RICH) |
| | | NULL (GLN RICH) |
| hP20-029.1 | SEQ ID NO: 60 | HUMAN PANTHER CLASSIFICATIONS |
| | | FAMILY (SUBFAMILY) |
| | | CYTOCHROME |
| | | P450(CYTOCHROME P450 7B1) |
| | | BIOLOGICAL PROCESS |
| | | Lipid, fatty acid and steroid |
| | | metabolism(2.03.00.00.00) > Steroid |
| | | metabolism(2.03.02.00.00) > Cholesterol |
| | | metabolism(2.03.02.01.00) |
| | | MOLECULAR FUNCTIONS |
| | | Oxidoreductase(1.19.00.00.00) > Oxygenase |
| | | (1.19.01.00.00) |
| | | HUMAN GENE ONTOLOGY |
| | | BIOLOGICAL PROCESS |
| | | peptidoglycan catabolism > bile acid |
| | | biosynthesis |
| | | bile acid metabolism > bile acid |
| | | biosynthesis |
| | | MOLECULAR FUNCTION |
| | | ligand binding or carrier > electron |
| | | transfer |
| | | steroid hydroxylase > oxysterol 7-alpha- |
| | | hydroxylase |
| | | CELL COMPONENT |
| | | endoplasmic reticulum > microsome |
| | | HUMAN PROTEIN DOMAINS (INTERPRO |
| | | SIGNATURES) |
| | | IPR002403 (EP450IV) |
| | | IPR001128 (p450) |
| hP20-030.1 | SEQ ID NO: 76 | HUMAN PANTHER CLASSIFICATIONS |
| | | FAMILY (SUBFAMILY) |
| | | EQUILIBRATIVE NUCLEOSIDE |
| | | TRANSPORTER-RELATED(EQUILIBRATIVE |
| | | NUCLEOSIDE TRANSPORTER 1) |
| | | BIOLOGICAL PROCESS |
| | | Nucleoside, nucleotide and nucleic acid |
| | | metabolism(2.04.00.00.00) |
| | | Transport(2.15.00.00.00) > Nucleoside, |
| | | nucleotide and nucleic acid transport(2.15.07.00.00) |
| | | MOLECULAR FUNCTIONS |
| | | Transporter(1.10.00.00.00) > Other |
| | | transporter(1.10.99.00.00) |
| | | HUMAN GENE ONTOLOGY |
| | | BIOLOGICAL PROCESS |
| | | metabolism > nucleobase, nucleoside, |
| | | nucleotide and nucleic acid metabolism |
| | | nucleobase, nucleoside, nucleotide and |
| | | nucleic acid transport > nucleoside transport |
| | | cell growth and maintenance > transport |
| | | cell growth and maintenance > cell |
| | | proliferation |
| | | MOLECULAR FUNCTION |
| | | glucosidase > mannosyl-oligosaccharide |
| | | glucosidase (processing A-glucosidase I) |
| | | CELL COMPONENT |
| | | cell > membrane fraction |
| | | plasma membrane > integral plasma |
| | | membrane protein |
| | | nucleus > nucleolus |
| | | cell > nucleus |
| | | HUMAN PROTEIN DOMAINS (INTERPRO |
| | | SIGNATURES) |
| | | IPR002259 (DERENTRNSPRT) |
| | | IPR002259 (Nucleoside tran) |
| | | IPR002259 (sp Q9UJY2 Q9UJY2 |
| | | HUMAN) |
| | | IPR002259 (2a57) |
| hP21-002.1 | SEQ ID NO: 79 | HUMAN PANTHER CLASSIFICATIONS |
| | | FAMILY (SUBFAMILY) |
| | | Unclassified |
| | | HUMAN GENE ONTOLOGY |
| | | No Gene Ontology |
| | | HUMAN PROTEIN DOMAINS (INTERPRO |
| | | SIGNATURES) |
| | | No Domain Hit |
| hP21-002.2 | SEQ ID NO: 81 | HUMAN PANTHER CLASSIFICATIONS |
| | | FAMILY (SUBFAMILY) |
| | | Unclassified |
| | | HUMAN GENE ONTOLOGY |
| | | No Gene Ontology |
| | | HUMAN PROTEIN DOMAINS (INTERPRO |
| | | SIGNATURES) |
| | | No Domain Hit |
| hP21-002.3 | SEQ ID NO: 83 | HUMAN PANTHER CLASSIFICATIONS |
| | | FAMILY (SUBFAMILY) |
| | | Unclassified |
| | | HUMAN GENE ONTOLOGY |
| | | No Gene Ontology |
| | | HUMAN PROTEIN DOMAINS (INTERPRO |
| | | SIGNATURES) |
| | | No Domain Hit |
| hP21-008.1 | SEQ ID NO: 89 | HUMAN PANTHER CLASSIFICATIONS |
| | | FAMILY (SUBFAMILY) |
| | | NOT ANNOTATED(NOT |
| | | ANNOTATED) |
| | | BIOLOGICAL PROCESS |
| | | Biological process |
| | | unclassified(2.99.00.00.00) |
| | | MOLECULAR FUNCTIONS |
| | | Molecular function |
| | | unclassified(1.97.00.00.00) |
| | | HUMAN GENE ONTOLOGY |
| | | BIOLOGICAL PROCESS |
| | | mitotic checkpoint > mitotic spindle |
| | | checkpoint |
| | | MOLECULAR FUNCTION |
| | | peptidase > cysteine-type peptidase |
| | | CELL COMPONENT |
| | | nuclear membrane > nuclear membrane |
| | | lumen |
| | | HUMAN PROTEIN DOMAINS (INTERPRO |
| | | SIGNATURES) |
| | | IPR003653 (Peptidase C48) |
| | | IPR003653 (SUMO PROTEASE) |
| hP21-008.2 | SEQ ID NO: 91 | HUMAN PANTHER CLASSIFICATIONS |
| | | FAMILY (SUBFAMILY) |
| | | NOT ANNOTATED(NOT |
| | | ANNOTATED) |
| | | BIOLOGICAL PROCESS |
| | | Biological process |
| | | unclassified(2.99.00.00.00) |
| | | MOLECULAR FUNCTIONS |
| | | Molecular function |
| | | unclassified(1.97.00.00.00) |
| | | HUMAN GENE ONTOLOGY |
| | | BIOLOGICAL PROCESS |
| | | mitotic checkpoint > mitotic spindle |
| | | checkpoint |
| | | MOLECULAR FUNCTIONS |
| | | peptidase > cysteine-type peptidase |
| | | CELL COMPONENT |
| | | nuclear membrane > nuclear membrane |
| | | lumen |
| | | HUMAN PROTEIN DOMAINS (INTERPRO |
| | | SIGNATURES) |
| | | IPR003653 (Peptidase C48) |
| | | IPR003653 (SUMO PROTEASE) |
| hP21-008.3 | SEQ ID NO: 93 | HUMAN PANTHER CLASSIFICATIONS |
| | | FAMILY (SUBFAMILY) |
| | | NOT ANNOTATED(NOT |
| | | ANNOTATED) |
| | | BIOLOGICAL PROCESS |
| | | Biological process |
| | | unclassified(2.99.00.00.00) |
| | | MOLECULAR FUNCTIONS |
| | | Molecular function |
| | | unclassified(1.97.00.00.00) |
| | | HUMAN GENE ONTOLOGY |
| | | BIOLOGICAL PROCESS |
| | | mitotic checkpoint > mitotic spindle |
| | | checkpoint |
| | | MOLECULAR FUNCTION |
| | | peptidase > cysteine-type peptidase |
| | | CELL COMPONENT |
| | | nuclear membrane > nuclear membrane |
| | | lumen |
| | | HUMAN PROTEIN DOMAINS (INTERPRO |
| | | SIGNATURES) |
| | | IPR003653 (Peptidase C48) |
| | | IPR003653 (SUMO PROTEASE) |
| hP21-008.4 | SEQ ID NO: 95 | HUMAN PANTHER CLASSIFICATIONS |
| | | FAMILY (SUBFAMILY) |
| | | NOT ANNOTATED(NOT |
| | | ANNOTATED) |
| | | BIOLOGICAL PROCESS |
| | | Biological process |
| | | unclassified(2.99.00.00.00) |
| | | MOLECULAR FUNCTIONS |
| | | Molecular function |
| | | unclassified(1.97.00.00.00) |
| | | HUMAN GENE ONTOLOGY |
| | | BIOLOGICAL PROCESS |
| | | mitotic checkpoint > mitotic spindle |
| | | checkpoint |
| | | MOLECULAR FUNCTION |
| | | peptidase > cysteine-type peptidase |
| | | CELL COMPONENT |
| | | nuclear membrane > nuclear membrane |
| | | lumen |
| | | HUMAN PROTEIN DOMAINS (INTERPRO |
| | | SIGNATURES) |
| | | IPR003653 (Peptidase C48) |
| | | IPR003653 (SUMO PROTEASE) |
| hP21-009.1 | SEQ ID NO: 101 | HUMAN PANTHER CLASSIFICATIONS |
| | | FAMILY (SUBFAMILY) |
| | | CF11928(gb def: downregulated in |
| | | ovarian cancer 1 [homo sapiens]) |
| | | BIOLOGICAL PROCESS |
| | | Biological process |
| | | unclassified(2.99.00.00.00) |
| | | MOLECULAR FUNCTIONS |
| | | Molecular function |
| | | unclassified(1.97.00.00.00) |
| | | HUMAN GENE ONTOLOGY |
| | | BIOLOGICAL PROCESS |
| | | non-selective vesicle transport > vesicle |
| | | docking |
| | | MOLECULAR FUNCTION |
| | | nucleotide binding > ATP binding |
| | | CELL COMPONENT |
| | | nuclear membrane > nuclear membrane |
| | | lumen |
| | | HUMAN PROTEIN DOMAINS (INTERPRO |
| | | SIGNATURES) |
| | | No Domain Hit |
| hP21-009.2 | SEQ ID NO: 103 | HUMAN PANTHER CLASSIFICATIONS |
| | | FAMILY (SUBFAMILY) |
| | | CF11928(gb def: downregulated in |
| | | ovarian cancer 1 [homo sapiens]) |
| | | BIOLOGICAL PROCESS |
| | | Biological process |
| | | unclassified(2.99.00.00.00) |
| | | MOLECULAR FUNCTIONS |
| | | Molecular function |
| | | unclassified(1.97.00.00.00) |
| | | HUMAN GENE ONTOLOGY |
| | | BIOLOGICAL PROCESS |
| | | non-selective vesicle transport > vesicle |
| | | docking |
| | | MOLECULAR FUNCTION |
| | | nucleotide binding > ATP binding |
| | | CELL COMPONENT |
| | | nuclear membrane > nuclear membrane |
| | | lumen |
| | | HUMAN PROTEIN DOMAINS (INTERPRO |
| | | SIGNATURES) |
| | | No Domain Hit |
| hP21-015.1 | SEQ ID NO: 114 | HUMAN PANTHER CLASSIFICATIONS |
| | | FAMILY (SUBFAMILY) |
| | | Unclassified |
| | | HUMAN GENE ONTOLOGY |
| | | No Gene Ontology |
| | | HUMAN PROTEIN DOMAINS (INTERPRO |
| | | SIGNATURES) |
| | | No Domain Hit |
| hP21-015.2 | SEQ ID NO: 116 | HUMAN PANTHER CLASSIFICATIONS |
| | | FAMILY (SUBFAMILY) |
| | | Unclassified |
| | | HUMAN GENE ONTOLOGY |
| | | BIOLOGICAL PROCESS |
| | | transcription, DNA-dependent > transcription |
| | | regulation |
| | | cell death > apoptosis |
| | | neurogenesis > central nervous system |
| | | development |
| | | peptidoglycan catabolism > microtubule- |
| | | based movement |
| | | microtubule-based process > microtubule- |
| | | based movement |
| | | nuclear congression > microtubule-based |
| | | movement |
| | | protein metabolism and modification > protein |
| | | modification |
| | | MOLECULAR FUNCTION |
| | | GO molecular function > cell cycle |
| | | regulator |
| | | enzyme > nitric oxide synthase |
| | | enzyme > protein-arginine deiminase |
| | | CELL COMPONENT |
| | | GO cellular component > extracellular |
| | | extracellular > extracellular space |
| | | mitochondrial membrane > mitochondrial |
| | | inner membrane |
| | | Golgi apparatus > Golgi lumen |
| | | HUMAN PROTEIN DOMAINS (INTERPRO |
| | | SIGNATURES) |
| | | NULL (ARG RICH) |
| | | IPR001472 (NLS BP) |
| hP21-020.1 | SEQ ID NO: 124 | HUMAN PANTHER CLASSIFICATIONS |
| | | FAMILY (SUBFAMILY) |
| | | Unclassified |
| | | HUMAN GENE ONTOLOGY |
| | | No Gene Ontology |
| | | HUMAN PROTEIN DOMAINS (INTERPRO |
| | | SIGNATURES) |
| | | No Domain Hit |
| hP21-025.1 | SEQ ID NO: 147 | HUMAN PANTHER CLASSIFICATIONS |
| | | FAMILY (SUBFAMILY) |
| | | THIOREDOXIN(MITOCHONDRIAL |
| | | THIOREDOXIN) |
| | | BIOLOGICAL PROCESS |
| | | Sulfur metabolism(2.10.00.00.00) > Sulfur |
| | | redox metabolism(2.10.01.00.00) |
| | | MOLECULAR FUNCTIONS |
| | | Oxidoreductase(1.19.00.00.00) > Other |
| | | oxidoreductase(1.19.99.00.00) |
| | | HUMAN GENE ONTOLOGY |
| | | BIOLOGICAL PROCESS |
| | | metabolism > electron transport |
| | | isoprenoid catabolism > sulfur |
| | | metabolism |
| | | cell growth and maintenance > cell |
| | | motility |
| | | humoral defense mechanism > antimicrobial |
| | | response |
| | | cell growth and maintenance > cell |
| | | proliferation |
| | | MOLECULAR FUNCTION |
| | | protein disulfide oxidoreductase > thioredoxin |
| | | redox-active disulfide bond electron |
| | | carrier > thioredoxin |
| | | CELL COMPONENT |
| | | GO cellular component > extracellular |
| | | cytoplasm > cytosol |
| | | HUMAN PROTEIN DOMAINS (INTERPRO |
| | | SIGNATURES) |
| | | IPR000063 (THIOREDOXIN) |
| | | IPR000063 (thiored) |
| | | IPR000063 (THIOREDOXIN 2) |
| hP21-025.2 | SEQ ID NO: 149 | HUMAN PANTHER CLASSIFICATIONS |
| | | FAMILY (SUBFAMILY) |
| | | Unclassified |
| | | HUMAN GENE ONTOLOGY |
| | | No Gene Ontology |
| | | HUMAN PROTEIN DOMAINS (INTERPRO |
| | | SIGNATURES) |
| | | No Domain Hit |
| hP21-025.3 | SEQ ID NO: 151 | HUMAN PANTHER CLASSIFICATIONS |
| | | FAMILY (SUBFAMILY) |
| | | NOT ANNOTATED(NOT |
| | | ANNOTATED) |
| | | BIOLOGICAL PROCESS |
| | | Biological process |
| | | unclassified(2.99.00.00.00) |
| | | MOLECULAR FUNCTIONS |
| | | Molecular function |
| | | unclassified(1.97.00.00.00) |
| | | HUMAN GENE ONTOLOGY |
| | | BIOLOGICAL PROCESS |
| | | neurogenesis > central nervous system |
| | | development |
| | | transcription, DNA-dependent > transcription |
| | | regulation |
| | | cell death > apoptosis |
| | | peptidoglycan catabolism > microtubule- |
| | | based movement |
| | | microtubule-based process > microtubule- |
| | | based movement |
| | | nuclear congression > microtubule-based |
| | | movement |
| | | MOLECULAR FUNCTION |
| | | enzyme > nitric oxide synthase |
| | | GO molecular function > cell cycle |
| | | regulator |
| | | molecular_function unknown > minor |
| | | histocompatibility antigen |
| | | CELL COMPONENT |
| | | GO cellular component > extracellular |
| | | extracellular > extracellular space |
| | | cell > nucleus |
| | | mitochondrial membrane > mitochondrial |
| | | inner membrane |
| | | HUMAN PROTEIN DOMAINS (INTERPRO |
| | | SIGNATURES) |
| | | No Domain Hit |
| hP21-025.4 | SEQ ID NO: 153 | HUMAN PANTHER CLASSIFICATIONS |
| | | FAMILY (SUBFAMILY) |
| | | NOT ANNOTATED(NOT |
| | | ANNOTATED) |
| | | BIOLOGICAL PROCESS |
| | | Biological process |
| | | unclassified(2.99.00.00.00) |
| | | MOLECULAR FUNCTIONS |
| | | Molecular function |
| | | unclassified(1.97.00.00.00) |
| | | HUMAN GENE ONTOLOGY |
| | | BIOLOGICAL PROCESS |
| | | metabolism > electron transport |
| | | isoprenoid catabolism > sulfur |
| | | metabolism |
| | | cell growth and maintenance > cell |
| | | motility |
| | | humoral defense mechanism > antimicrobial |
| | | response |
| | | cell growth and maintenance > cell |
| | | proliferation |
| | | MOLECULAR FUNCTION |
| | | protein disulfide oxidoreductase > thioredoxin |
| | | redox-active disulfide bond electron |
| | | carrier > thioredoxin |
| | | CELL COMPONENT |
| | | GO cellular component > extracellular |
| | | cytoplasm > cytosol |
| | | HUMAN PROTEIN DOMAINS (INTERPRO |
| | | SIGNATURES) |
| | | IPR000063 (THIOREDOXIN) |
| | | IPR000063 (thiored) |
| | | IPR000063 (THIOREDOXIN 2) |
| hP21-025.5 | SEQ ID NO: 155 | HUMAN PANTHER CLASSIFICATIONS |
| | | FAMILY (SUBFAMILY) |
| | | NOT ANNOTATED(NOT |
| | | ANNOTATED) |
| | | BIOLOGICAL PROCESS |
| | | Biological process |
| | | unclassified(2.99.00.00.00) |
| | | MOLECULAR FUNCTIONS |
| | | Molecular function |
| | | unclassified(1.97.00.00.00) |
| | | HUMAN GENE ONTOLOGY |
| | | No Gene Ontology |
| | | HUMAN PROTEIN DOMAINS (INTERPRO |
| | | SIGNATURES) |
| | | No Domain Hit |
| hP21-025.6 | SEQ ID NO: 157 | HUMAN PANTHER CLASSIFICATIONS |
| | | FAMILY (SUBFAMILY) |
| | | NOT ANNOTATED(NOT |
| | | ANNOTATED) |
| | | BIOLOGICAL PROCESS |
| | | Biological process |
| | | unclassified(2.99.00.00.00) |
| | | MOLECULAR FUNCTIONS |
| | | Molecular function |
| | | unclassified(1.97.00.00.00) |
| | | HUMAN GENE ONTOLOGY |
| | | BIOLOGICAL PROCESS |
| | | neurogenesis > central nervous system |
| | | development |
| | | transcription, DNA-dependent > transcription |
| | | regulation |
| | | cell death > apoptosis |
| | | peptidoglycan catabolism > microtubule- |
| | | based movement |
| | | microtubule-based process > microtubule- |
| | | based movement |
| | | nuclear congression > microtubule-based |
| | | movement |
| | | MOLECULAR FUNCTION |
| | | enzyme > nitric oxide synthase |
| | | GO molecular function > cell cycle |
| | | regulator |
| | | molecular_function unknown > minor |
| | | histocompatibility antigen |
| | | CELL COMPONENT |
| | | GO cellular component > extracellular |
| | | extracellular > extracellular space |
| | | cell > nucleus |
| | | mitochondrial membrane > mitochondrial |
| | | inner membrane |
| | | HUMAN PROTEIN DOMAINS (INTERPRO |
| | | SIGNATURES) |
| | | No Domain Hit |
| hP21-025.7 | SEQ ID NO: 159 | HUMAN PANTHER CLASSIFICATIONS |
| | | FAMILY (SUBFAMILY) |
| | | Unclassified |
| | | HUMAN GENE ONTOLOGY |
| | | BIOLOGICAL PROCESS |
| | | metabolism > electron transport |
| | | MOLECULAR FUNCTION |
| | | protein disulfide oxidoreductase > thioredoxin |
| | | redox-active disulfide bond electron |
| | | carrier > thioredoxin |
| | | CELL COMPONENT |
| | | GO cellular component > extracellular |
| | | HUMAN PROTEIN DOMAINS (INTERPRO |
| | | SIGNATURES) |
| | | No Domain Hit |
| hP21-028.1 | SEQ ID NO: 165 | HUMAN PANTHER CLASSIFICATIONS |
| | | FAMILY (SUBFAMILY) |
| | | CBP/P300-RELATED(P300) |
| | | BIOLOGICAL PROCESS |
| | | Nucleoside, nucleotide and nucleic acid |
| | | metabolism(2.04.00.00.00) > mRNA |
| | | transcription(2.04.04.00.00) > mRNA transcription |
| | | regulation(2.04.04.04.00) |
| | | MOLECULAR FUNCTIONS |
| | | Transcription factor(1.04.00.00.00) > Transcription |
| | | cofactor(1.04.08.00.00) |
| | | Nucleic acid binding(1.06.00.00.00) > Chromatin/ |
| | | chromatin-binding protein(1.06.26.00.00) |
| | | Transferase(1.20.00.00.00) > Acetyltransferase |
| | | (1.20.08.00.00) |
| | | HUMAN GENE ONTOLOGY |
| | | BIOLOGICAL PROCESS |
| | | transcription, DNA-dependent > transcription |
| | | from Pol II promoter |
| | | cell growth and maintenance > cell cycle |
| | | cell communication > signal transduction |
| | | ectoderm development > neurogenesis |
| | | protein metabolism and modification > protein |
| | | complex assembly |
| | | MOLECULAR FUNCTION |
| | | DNA binding > transcription factor |
| | | protein binding > protein C-terminus |
| | | binding |
| | | CELL COMPONENT |
| | | cell > nucleus |
| | | cell > cytoplasm |
| | | HUMAN PROTEIN DOMAINS (INTERPRO |
| | | SIGNATURES) |
| | | IPR001487 (BROMODOMAIN) |
| | | IPR000433 (ZnF ZZ) |
| | | IPR001487 (BROMO) |
| | | IPR003101 (KIX) |
| | | IPR001487 (bromodomain) |
| | | IPR000433 (ZZ) |
| | | IPR000197 (zf-TAZ) |
| | | IP000694 (PRO RICH 3) |
| | | IPR000197 (ZF TAZ 2) |
| | | IPR0001487 (BROMODOMAIN 2) |
| | | IPR000433 (ZF ZZ) |
| | | NULL (GLN RICH) |
| hP21-029.1 | SEQ ID NO: 171 | HUMAN PANTHER CLASSIFICATIONS |
| | | FAMILY (SUBFAMILY) |
| | | ATP-DEPENDENT DNA HELICASE |
| | | II, 70 KDA SUBUNIT-RELATED(ATP-DEPENDENT |
| | | DNA HELICASE II, 70 KDA SUBUNIT) |
| | | BIOLOGICAL PROCESS |
| | | Nucleoside, nucleotide and nucleic acid |
| | | metabolism(2.04.00.00.00) > DNA |
| | | metabolism(2.04.03.00.00) > DNA |
| | | recombination(2.04.03.04.00) |
| | | MOLECULAR FUNCTIONS |
| | | Nucleic acid binding(1.06.00.00.00) > Helicase |
| | | (1.06.08.00.00) > DNA helicase(1.06.08.02.00) |
| | | HUMAN GENE ONTOLOGY |
| | | BIOLOGICAL PROCESS |
| | | DNA dependent DNA replication > DNA |
| | | ligation |
| | | DNA repair > double-strand break repair |
| | | double-strand break repair > DNA- |
| | | nonhomologous end-joining |
| | | DNA metabolism > DNA recombination |
| | | MOLECULAR FUNCTION |
| | | nucleic acid binding > DNA binding |
| | | DNA binding > double-stranded DNA |
| | | binding |
| | | DNA dependent adenosinetriphosphatase > ATP |
| | | dependent DNA helicase |
| | | ATP dependent helicase > ATP |
| | | dependent DNA helicase |
| | | DNA helicase > ATP dependent DNA |
| | | helicase |
| | | DNA binding > DNA helicase |
| | | helicase > DNA helicase |
| | | CELL COMPONENT |
| | | cell > membrane fraction |
| | | cell > nucleus |
| | | HUMAN PROTEIN DOMAINS (INTERPRO |
| | | SIGNATURES) |
| | | IPR003034 (SAP) |
| | | IPR004008 (ku) |
| | | IPR005161 (Ku N) |
| | | IPR003034 (SAP) |
| | | IPR005160 (Ku C) |
| | | IPR003034 (SAP MOTIF) |
| | | IPR004008 (ku70) |
| hP21-029.2 | SEQ ID NO: 173 | HUMAN PANTHER CLASSIFICATIONS |
| | | FAMILY (SUBFAMILY) |
| | | ATP-DEPENDENT DNA HELICASE |
| | | II, 70 KDA SUBUNIT-RELATED(ATP-DEPENDENT |
| | | DNA HELICASE II, 70 KDA SUBUNIT) |
| | | BIOLOGICAL PROCESS |
| | | Nucleoside, nucleotide and nucleic acid |
| | | metabolism(2.04.00.00.00) > DNA |
| | | metabolism(2.04.03.00.00) > DNA |
| | | recombination(2.04.03.04.00) |
| | | MOLECULAR FUNCTIONS |
| | | Nucleic acid binding(1.06.00.00.00) > Helicase |
| | | (1.06.08.00.00) > DNA helicase(1.06.08.02.00) |
| | | HUMAN GENE ONTOLOGY |
| | | BIOLOGICAL PROCESS |
| | | DNA dependent DNA replication > DNA |
| | | ligation |
| | | DNA repair > double-strand break repair |
| | | double-strand break repair > DNA- |
| | | nonhomologous end-joining |
| | | DNA metabolism > DNA recombination |
| | | MOLECULAR FUNCTION |
| | | nucleic acid binding > DNA binding |
| | | DNA binding > double-stranded DNA |
| | | binding |
| | | DNA dependent adenosinetriphosphatase > ATP |
| | | dependent DNA helicase |
| | | ATP dependent helicase > ATP |
| | | dependent DNA helicase |
| | | DNA helicase > ATP dependent DNA |
| | | helicase |
| | | DNA binding > DNA helicase |
| | | helicase > DNA helicase |
| | | CELL COMPONENT |
| | | cell > membrane fraction |
| | | cell > nucleus |
| | | HUMAN PROTEIN DOMAINS (INTERPRO |
| | | SIGNATURES) |
| | | IPR003034 (SAP) |
| | | IPR005161 (Ku N) |
| | | IPR004008 (ku) |
| | | IPR003034 (SAP) |
| | | IPR005160 (Ku C) |
| | | IPR003034 (SAP MOTIF) |
| | | IPR004008 (ku70) |
| hP21-036.1 | SEQ ID NO: 179 | HUMAN PANTHER CLASSIFICATIONS |
| | | FAMILY (SUBFAMILY) |
| | | CF11584(LARGE TUMOR |
| | | SUPPRESSOR 2) |
| | | BIOLOGICAL PROCESS |
| | | Oncogenesis(2.17.00.00.00) > Tumor |
| | | suppressor(2.17.01.00.00) |
| | | MOLECULAR FUNCTIONS |
| | | Kinase(1.15.00.00.00) > Protein |
| | | kinase(1.15.01.00.00) |
| | | HUMAN GENE ONTOLOGY |
| | | BIOLOGICAL PROCESS |
| | | cell cycle control > control of mitosis |
| | | imaginal discs development > imaginal |
| | | disc growth |
| | | cytoskeleton organization and biogenesis > establishment |
| | | of cell polarity |
| | | cytoskeleton organization and biogenesis > cytoskeletal |
| | | regulation |
| | | MOLECULAR FUNCTION |
| | | enzyme > protein kinase |
| | | nucleotide binding > ATP binding |
| | | CELL COMPONENT |
| | | cell > nucleus |
| | | GO cellular component > cellular_component |
| | | unknown |
| | | cytoplasm > ribosome |
| | | cytoplasm > cytoskeleton |
| | | HUMAN PROTEIN DOMAINS (INTERPRO |
| | | SIGNATURES) |
| | | IPR001245 (TyrKc) |
| | | IPR002290 (S TKc) |
| | | IPR000961 (S TK X) |
| | | IPR000719 (pkinase) |
| | | IPR000719 (PROTEIN KINASE DOM) |
| | | IPR000694 (PRO RICH) |
| | | IPR000449 (UBA) |
| | | IPR000719 (sp Q9NRM7 Q9NRM7 |
| | | HUMAN) |
| hP21-036.2 | SEQ ID NO: 181 | HUMAN PANTHER CLASSIFICATIONS |
| | | FAMILY (SUBFAMILY) |
| | | CF11584(LARGE TUMOR |
| | | SUPPRESSOR 2) |
| | | BIOLOGICAL PROCESS |
| | | Oncogenesis(2.17.00.00.00) > Tumor |
| | | suppressor(2.17.01.00.00) |
| | | MOLECULAR FUNCTIONS |
| | | Kinase(1.15.00.00.00) > Protein |
| | | kinase(1.15.01.00.00) |
| | | HUMAN GENE ONTOLOGY |
| | | BIOLOGICAL PROCESS |
| | | cell cycle control > control of mitosis |
| | | imaginal discs development > imaginal |
| | | disc growth |
| | | cytoskeleton organization and biogenesis > establishment |
| | | of cell polarity |
| | | cytoskeleton organization and biogenesis > cytoskeletal |
| | | regulation |
| | | MOLECULAR FUNCTION |
| | | enzyme > protein kinase |
| | | nucleotide binding > ATP binding |
| | | CELL COMPONENT |
| | | cell > nucleus |
| | | GO cellular component > cellular_component |
| | | unknown |
| | | cytoplasm > ribosome |
| | | cytoplasm > cytoskeleton |
| | | HUMAN PROTEIN DOMAINS (INTERPRO |
| | | SIGNATURES) |
| | | IPR001245 (TyrKc) |
| | | IPR002290 (S TKc) |
| | | IPR000961 (S TK X) |
| | | IPR000719 (pkinase) |
| | | IPR000719 (PROTEIN KINASE DOM) |
| | | IPR000694 (PRO RICH) |
| | | IPR000449 (UBA) |
| | | IPR000719 (sp Q9NRM7 Q9NRM7 |
| | | HUMAN) |
| hP21-037.1 | SEQ ID NO: 187 | HUMAN PANTHER CLASSIFICATIONS |
| | | FAMILY (SUBFAMILY) |
| | | Unclassified |
| | | HUMAN GENE ONTOLOGY |
| | | BIOLOGICAL PROCESS |
| | | GO biological process > cell growth and |
| | | maintenance |
| | | MOLECULAR FUNCTION |
| | | ligand binding or carrier > calcium |
| | | binding |
| | | CELL COMPONENT |
| | | cell > membrane fraction |
| | | HUMAN PROTEIN DOMAINS (INTERPRO |
| | | SIGNATURES) |
| | | No Domain Hit |
| hP21-037.2 | SEQ ID NO: 189 | HUMAN PANTHER CLASSIFICATIONS |
| | | FAMILY (SUBFAMILY) |
| | | DELETED IN CANCER 1(DELETED |
| | | IN CANCER 1 (DICE 1)) |
| | | BIOLOGICAL PROCESS |
| | | Oncogenesis(2.17.00.00.00) > Tumor |
| | | suppressor(2.17.01.00.00) |
| | | MOLECULAR FUNCTIONS |
| | | Molecular function |
| | | unknown(1.99.00.00.00) |
| | | HUMAN GENE ONTOLOGY |
| | | BIOLOGICAL PROCESS |
| | | GO biological process > cell growth and |
| | | maintenance |
| | | MOLECULAR FUNCTION |
| | | ligand binding or carrier > calcium |
| | | binding |
| | | CELL COMPONENT |
| | | cell > membrane fraction |
| | | HUMAN PROTEIN DOMAINS (INTERPRO |
| | | SIGNATURES) |
| | | IPR002035 (VWFA) |
| hP21-037.3 | SEQ ID NO: 191 | HUMAN PANTHER CLASSIFICATIONS |
| | | FAMILY (SUBFAMILY) |
| | | DELETED IN CANCER 1(DELETED |
| | | IN CANCER 1 (DICE 1)) |
| | | BIOLOGICAL PROCESS |
| | | Oncogenesis(2.17.00.00.00) > Tumor |
| | | suppressor(2.17.01.00.00) |
| | | MOLECULAR FUNCTIONS |
| | | Molecular function |
| | | unknown(1.99.00.00.00) |
| | | HUMAN GENE ONTOLOGY |
| | | BIOLOGICAL PROCESS |
| | | GO biological process > cell growth and |
| | | maintenance |
| | | MOLECULAR FUNCTION |
| | | ligand binding or carrier > calcium |
| | | binding |
| | | CELL COMPONENT |
| | | cell > membrane fraction |
| | | HUMAN PROTEIN DOMAINS (INTERPRO |
| | | SIGNATURES) |
| | | IPR002035 (VWFA) |

[0313] A CA protein (CAP) is a G-protein coupled receptor protein wherein the CAP sequence is selected from the group consisting of SEQ ID NOS: 6, 8, 10, 19, 21, 23, and 25.

[0314] A CA protein (CAP) is a nucleotide binding protein wherein the CAP sequence is selected from the group consisting of SEQ ID NOS: 34, 36, 38, 101 and 103 shown in Tables 1-21.

[0315] A CA protein (CAP) is a nucleic acid binding protein wherein the CAP sequence is selected from the group consisting of SEQ ID NOS: 52, 54, 165, 171 and 173 shown in Tables 1-21.

[0316] A CA protein (CAP) is a calcium binding protein wherein the CAP sequence is selected from the group consisting of SEQ ID NOS: 187, 189 and 191.

[0317] A CA protein (CAP) is a cysteine-type peptidase wherein the CAP sequence is selected from the group consisting of SEQ ID NOS: 89, 91, 93 and 95.

[0318] A CA protein (CAP) is involved in apoptosis wherein the CAP sequence is selected from the group consisting of SEQ ID NOS: 116, 151 and 157.

[0319] A CA protein (CAP) is expressed on a cell surface, wherein the CA protein is selected from the group consisting of SEQ ID NOS: 6, 8, 10, 19, 21, 23, 25, 34, 36, 38, 44, 46, 52, 54, 60, 76, 79, 81, 83, 89, 91, 93, 95, 101, 103, 114, 116, 124, 147, 149, 151, 153, 155, 157, 159, 165, 171, 173, 179, 181, 187, 189, and 191.

[0320] Certain aspects of the present invention are described in greater detail in the non-limiting examples that follow.

### EXAMPLES

[0321] The following examples are put forth so as to provide those of ordinary skill in the art with a complete disclosure and description of how to make and use the present invention, and are not intended to limit the scope of what the inventors regard as their invention nor are they intended to represent that the experiments below are all and only experiments performed. Efforts have been made to ensure accuracy with respect to numbers used (e.g. amounts, temperature, etc.) but some experimental errors and deviations should be accounted for. Unless indicated otherwise, parts are parts by weight, molecular weight is weight average molecular weight, temperature is in degrees Celsius, and pressure is at or near atmospheric.

### Example 1

### Insertion Site Analysis Following Tumor Induction in Mice

[0322] Tumors are induced in mice using either mouse mammary tumor virus (MMTV) or murine leukemia virus (MLV). MMTV causes mammary adenocarcinomas and MLV causes a variety of different hematopoetic malignancies (primarily T- or B-cell lymphomas). Three routes of infection are used: (1) injection of neonates with purified virus preparations, (2) infection by milk-borne virus during nursing, and (3) genetic transmission of pathogenic proviruses via the germ-line (Akvr1 and/or Mtv2). The type of malignancy present in each affected mouse is determined by histological analysis of H&E-stained thin sections of formalin-fixed, paraffin-embedded biopsy samples. Host DNA sequences flanking all clonally-integrated proviruses in each tumor are recovered by nested anchored-PCR using two virus-specific primers and two primers specific for a 40 bp double stranded DNA anchor ligated to restriction enzyme digested tumor DNA. Amplified bands representing host/virus junction fragments are cloned and sequenced. Then the host sequences (called “tags”) are used to BLAST analyze the Celera mouse genomic sequence. For each individual tag, three parameters are recorded: (1) the mouse chromosome assignment, (2) base pair coordinates at which the integration occurred, and (3) provirus orientation. Using this information, all available tags from all analyzed tumors are mapped to the mouse genome. To identify the protooncogene targets of provirus insertion mutation, the provirus integration pattern at each cluster of integrants is analyzed relative to the locations of all known genes in the transcriptome. The presence of provirus at the same locus in two or more independent tumors is prima facie evidence that a protooncogene is present at or very near the proviral integration sites. This is because the genome is too large for random integrations to result in observable clustering. Any clustering that is detected is unequivocal evidence for biological selection during tumorigenesis. In order to identify the human orthologs of the protooncogene targets of provirus insertion mutation, a comparative analysis of syntenic regions of the mouse and human genomes is performed.

[0323] An example of PCR amplification of host/virus junction fragments is presented in FIG. 1. Lane 1 contains the amplification products from normal control DNA and lane 2 contains the amplification products from tumor DNA. The bands result from 5′ host/virus junction fragments present in the DNA samples. Lane 1 has bands from the env/3′ LTR junctions from all proviruses (upper) and the host/5′ LTR from the pathogenic endogenous Mtv2 provirus present in this particular mouse strain. This endogenous provirus is detected because its sequence is identical to the new clonally integrated proviruses in the tumor. All four new clonally integrated proviruses known to be in this tumor are readily detected.

### Example 2

### Analysis of Quantitative RT-PCR: Comparative C_{T} Method

[0324] The expression level of target genes is quantified using the ABI PRISM 7900HT Sequence Detection System (Applied Biosystems, California). The method is based on the quantitation of the initial copy number of target template in comparison to that of a reference (normalizer) housekeeper gene (Pre-Developed TaqMan® Assay Reagents Gene Expression Quantification Protocol, Applied Biosystems, 2001). Accumulation of DNA product with each PCR cycle is related to amplicon efficiency and the initial template concentration. Therefore the amplification efficiency of both the target and the normalizer must be approximately equal. The threshold cycle (C_{T}), which is dependent on the starting template copy number and the DNA amplification efficiency, is a PCR cycle during which PCR product growth is exponential. With a similar dynamic range for the target and normalizer, the comparative C_{T} method is applicable.

[0325] An example of the comparative C_{T} method of gene expression for quantitative RT-PCR is shown in FIG. 2. In the first step, assays are performed in quadruplicate on a normal tissue and several sample tissues. In these tissues, the means and standard deviations of C_{T} values are determined for housekeeper genes (chosen as controls if shown to be biologically stable among various samples, irrespective of disease state) and for the target gene. FIG. 2 shows an example of average C_{T} values for a housekeeper gene and target gene. These values can fall within a range from upper teens to 40 depending on the intrinsic expression level of the gene in the particular tissue. The coefficient of variance of all replicate sets cannot exceed 1.5%.

[0326] An assessment of how the ΔC_{T} changes with template dilution verifies that the efficiencies of the target and housekeeper amplicons are approximately equal if the log input amount of template RNA versus ΔC_{T} plot has a slope <0.10. With the relative efficiencies verified for target and housekeeper, the ΔΔC_{T} comparative calculation becomes valid, as mentioned above. An example of the calculated difference between the C_{T} values of target and housekeeper genes (ΔC_{T}) for various samples is shown in FIG. 3. The ΔΔC_{T} is calculated for each sample by subtracting its ΔC_{T} value from the ΔC_{T} value of the baseline (calibrator) sample. If the expression is increased in some samples and decreased in others, ΔΔC_{T} will be a mixture of negative and positive values. The final step in the calculation is to transform these values to absolute values. The formula for this is:

Comparative expression level=2^{-ΔCT}

[0327] The final value for the calibrator should always be one. FIG. 4 shows the ΔΔC_{T} and comparative expression level for each sample from FIG. 3.

### Example 3

### Detection of Elevated Levels of cDNA Associated with Cancer Using Arrays

[0328] cDNA sequences representing a variety of candidate CA genes to be screened for differential expression in cancer are assayed by hybridization on polynucleotide arrays. The cDNA sequences include cDNA clones isolated from cell lines or tissues of interest. The cDNA sequences analyzed also include polynucleotides comprising sequence overlap with sequences in the Unigene database, and which encode a variety of gene products of various origins, functionality, and levels of characterization. cDNAs are spotted onto reflective slides (Amersham) according to methods well known in the art at a density of 9,216 spots per slide representing 4,068 sequences (including controls) spotted in duplicate, with approximately 0.8 μl of an approximately 200 ng/μl solution of cDNA.

[0329] PCR products of selected cDNA clones corresponding to the gene products of interest are prepared in a 50% DMSO solution. These PCR products are spotted onto Amersham aluminum microarray slides at a density of 9216 clones per array using a Molecular Dynamics Generation III spotting robot. Clones are spotted in duplicate, for a total of 4608 different sequences per chip.

[0330] cDNA probes are prepared from total RNA obtained by laser capture microdissection (LCM, Arcturus Enginering Inc., Mountain View, Calif.) of tumor tissue samples and normal tissue samples isolated from patients.

[0331] Total RNA is first reverse transcribed into cDNA using a primer containing a T7 RNA polymerase promoter, followed by second strand DNA synthesis. cDNA is then transcribed in vitro to produce antisense RNA using the T7 promoter-mediated expression (see, e.g., Luo et al. (1999) Nature Med 5:117-122), and the antisense RNA is then converted into cDNA. The second set of cDNAs are again transcribed in vitro, using the T7 promoter, to provide antisense RNA. This antisense RNA is then fluorescently labeled, or the RNA is again converted into cDNA, allowing for a third round of T7-mediated amplification to produce more antisense RNA. Thus the procedure provides for two or three rounds of in vitro transcription to produce the final RNA used for fluorescent labeling. Probes are labeled by making fluorescently labeled cDNA from the RNA starting material. Fluorescently labeled cDNAs prepared from the tumor RNA sample are compared to fluorescently labeled cDNAs prepared from normal cell RNA sample. For example, the cDNA probes from the normal cells are labeled with Cy3 fluorescent dye (green) and the cDNA probes prepared from suspected cancer cells are labeled with Cy5 fluorescent dye (red).

[0332] The differential expression assay is performed by mixing equal amounts of probes from tumor cells and normal cells of the same patient. The arrays are prehybridized by incubation for about 2 hrs at 60° C. in 5×SSC, 0.2% SDS, 1 mM EDTA, and then washing three times in water and twice in isopropanol. Following prehybridization of the array, the probe mixture is then hybridized to the array under conditions of high stringency (overnight at 42° C. in 50% formamide, 5×SSC, and 0.2% SDS. After hybridization, the array is washed at 55° C. three times as follows: 1) first wash in 1×SSC/0.2% SDS; 2) second wash in 0.1×SSC/0.2% SDS; and 3) third wash in 0.1×SSC.

[0333] The arrays are then scanned for green and red fluorescence using a Molecular Dynamics Generation III dual color laser-scanner/detector. The images are processed using BioDiscovery Autogene software, and the data from each scan set normalized. The experiment is repeated, this time labeling the two probes with the opposite color in order to perform the assay in both “color directions.” Each experiment is sometimes repeated with two more slides (one in each color direction). The data from each scan is normalized, and the level of fluorescence for each sequence on the array expressed as a ratio of the geometric mean of 8 replicate spots/genes from the four arrays or 4 replicate spots/gene from 2 arrays or some other permutation.

[0334] Normalization: The objective of normalization is to generate a cDNA library in which all transcripts expressed in a particular cell type or tissue are equally represented (S. M. Weissman, Mol. Biol. Med. 4(3):133-143 (1987); Patanjali, et al., Proc. Natl. Acad. Sci. USA 88(5):1943-1947 (1991)), and therefore isolation of as few as 30,000 recombinant clones in an optimally normalized library may represent the entire gene expression repertoire of a cell, estimated to number 10,000 per cell.

[0335] Total RNA is extracted from harvested cells using RNeasy™ Protect Kit (Qiagen, Valencia, Calif.), following manufacturer's recommended procedures. RNA is quantified using RiboGreen™ RNA quantification kit (Molecular Probes, Inc. Eugene, Oreg.). One μg of total RNA is reverse transcribed and PCR amplified using SMART™ PCR cDNA synthesis kit (ClonTech, Palo Alto, Calif.). The cDNA products are size-selected by agarose gel electrophoresis using standard procedures (Sambrook, J. T., et al. Molecular Cloning: A Laboratory Manual, 2d ed., Cold Spring Harbor Laboratory Press, NY). The cDNA is extracted using Bio 101 Geneclean® II kit (Qbiogene, Carlsbad, Calif.). Normalization of the cDNA is carried out using kinetics of hybridization principles: 1.0 μg of cDNA is denatured by heat at 100° C. for 10 minutes, then incubated at 42° C. for 42 hours in the presence of 120 mM NaCl, 10 mM Tris.HCl (pH=8.0), 5 mM EDTA.Na+ and 50% formamide. Single-stranded cDNA (“normalized”) is purified by hydroxyapatite chromatography (#130-0520, BioRad, Hercules, Calif.) following the manufacturer's recommended procedures, amplified and converted to double-stranded cDNA by three cycles of PCR amplification, and cloned into plasmid vectors using standard procedures (Sambrook, J. T., et al. Molecular Cloning: A Laboratory Manual, 2d ed., Cold Spring Harbor Laboratory Press, NY). All primers/adaptors used in the normalization and cloning process are provided by the manufacturer in the SMAR™ PCR cDNA synthesis kit (ClonTech, Palo Alto, Calif.). Supercompetent cells (XL-2 Blue Ultracompetent Cells, Stratagene, Calif.) are transfected with the normalized cDNA libraries, plated on solid media and grown overnight at 36° C.

[0336] The sequences of 10,000 recombinants per normalized library are analyzed by capillary sequencing using the ABI PRISM 3700 DNA Analyzer (Applied Biosystems, California). To determine the representation of transcripts in a library, BLAST analysis is performed on the clone sequences to assign transcript identity to each isolated clone, i.e., the sequences of the isolated polynucleotides are first masked to eliminate low complexity sequences using the XBLAST masking program (Claverie “Effective Large-Scale Sequence Similarity Searches,” Computer Methods for Macromolecular Sequence Analysis, Doolittle, ed., Meth. Enzymol. 266:212-227 Academic Press, NY, N.Y. (1996); see particularly Claverie, in “Automated DNA Sequencing and Analysis Techniques” Adams et al., eds., Chap. 36, p. 267 Academic Press, San Diego, 1994 and Claverie et al. Comput. Chem. (1993) 17:191). Generally, masking does not influence the final search results, except to eliminate sequences of relative little interest due to their low complexity, and to eliminate multiple “hits” based on similarity to repetitive regions common to multiple sequences, e.g., Alu repeats. The remaining sequences are then used in a BLASTN vs. GenBank search. The sequences are also used as query sequence in a BLASTX vs. NRP (non-redundant proteins) database search.

[0337] Automated sequencing reactions are performed using a Perkin-Elmer PRISM Dye Terminator Cycle Sequencing Ready Reaction Kit containing AmpliTaq DNA Polymerase, FS, according to the manufacturer's directions. The reactions are cycled on a GeneAmp PCR System 9600 as per manufacturer's instructions, except that they are annealed at 20° C. or 30° C. for one minute. Sequencing reactions are ethanol precipitated, pellets are resuspended in 8 microliters of loading buffer, 1.5 microliters is loaded on a sequencing gel, and the data is collected by an ABI PRISM 3700 DNA Sequencer. (Applied Biosystems, Foster City, Calif.).

[0338] The number of times a sequence is represented in a library is determined by performing sequence identity analysis on the cloned cDNA sequences and assigning transcript identity to each isolated clone. First, each sequence is checked to determine if it is a bacterial, ribosomal, or mitochondrial contaminant. Such sequences are excluded from the subsequent analysis. Second, sequence artifacts, such as vector and repetitive elements, are masked and/or removed from each sequence.

[0339] The remaining sequences are compared via BLAST (Altschul et. al, J. Mol. Biol., 215:40, 1990) to GenBank and EST databases for gene identification and are compared with each other via FastA (Pearson & Lipman, PNAS, 85:2444, 1988) to calculate the frequency of cDNA appearance in the normalized cDNA library. The sequences are also searched against the GenBank and GeneSeq nucleotide databases using the BLASTN program (BLASTN 1.3 MP: Altschul et al., J. Mol. Bio. 215:403, 1990). Fourth, the sequences are analyzed against a non-redundant protein (NRP) database with the BLASTX program (BLASTX 1.3 MP: Altschul et al., supra). This protein database is a combination of the Swiss-Prot, PIR, and NCBI GenPept protein databases. The BLASTX program is run using the default BLOSUM-62 substitution matrix with the filter parameter: “xnu+seg”. The score cutoff utilized is 75. Assembly of overlapping clones into contigs is done using the program Sequencher (Gene Codes Corp.; Ann Arbor, Mich.). The assembled contigs are analyzed using the programs in the GCG package (Genetic Computer Group, University Research Park, 575 Science Drive, Madison, Wis. 53711) Suite Version 10.1.

### Example 4

### Detection of CA-Sequences in Human Cancer Cells and Tissues

[0340] DNA from prostate and breast cancer tissues and other human cancer tissues, human colon, normal human tissues including non-cancerous prostate, and from other human cell lines are extracted following the procedure of Delli Bovi et al. (1986, Cancer Res. 46:6333-6338). The DNA is resuspended in a solution containing 0.05 M Tris HCl buffer, pH 7.8, and 0.1 mM EDTA, and the amount of DNA recovered is determined by microfluorometry using Hoechst 33258 dye. Cesarone, C. et al., Anal Biochem 100:188-197 (1979).

[0341] Polymerase chain reaction (PCR) is performed using Taq polymerase following the conditions recommended by the manufacturer (Perkin Elmer Cetus) with regard to buffer, Mg²⁺, and nucleotide concentrations. Thermocycling is performed in a DNA cycler by denaturation at 94° C. for 3 min. followed by either 35 or 50 cycles of 94° C. for 1.5 min., 50° C. for 2 min. and 72° C. for 3 min. The ability of the PCR to amplify the selected regions of the CA gene is tested by using a cloned CA polynucleotide(s) as a positive template(s). Optimal Mg²⁺, primer concentrations and requirements for the different cycling temperatures are determined with these templates. The master mix recommended by the manufacturer is used. To detect possible contamination of the master mix components, reactions without template are routinely tested.

[0342] Southern blotting and hybridization are performed as described by Southern, E. M., (J. Mol. Biol. 98:503-517, 1975), using the cloned sequences labeled by the random primer procedure (Feinberg, A. P., et al., 1983, Anal. Biochem. 132:6-13). Prehybridization and hybridization are performed in a solution containing 6×SSPE, 5% Denhardt's, 0.5% SDS, 50% formamide, 100 μg/ml denaturated salmon testis DNA, incubated for 18 hrs at 42° C., followed by washings with 2×SSC and 0.5% SDS at room temperature and at 37° C. and finally in 0.1×SSC with 0.5% SDS at 68° C. for 30 min (Sambrook et al., 1989, in “Molecular Cloning: A Laboratory Manual”, Cold Spring Harbor Lab. Press). For paraffin-embedded tissue sections the conditions described by Wright and Manos (1990, in “PCR Protocols”, Innis et al., eds., Academic Press, pp. 153-158) are followed using primers designed to detect a 250 bp sequence.

### Example 5

### Expression of Cloned Polynucleotides in Host Cells

[0343] To study the protein products of CA genes, restriction fragments from CA DNA are cloned into the expression vector pMT2 (Sambrook, et al., Molecular Cloning: A Laboratory Manual, Cold Spring Harbor Laboratory Press pp 16.17-16.22 (1989)) and transfected into COS cells grown in DMEM supplemented with 10% FCS. Transfections are performed employing calcium phosphate techniques (Sambrook, et al (1989) pp. 16.32-16.40, supra) and cell lysates are prepared forty-eight hours after transfection from both transfected and untransfected COS cells. Lysates are subjected to analysis by immunoblotting using anti-peptide antibody.

[0344] In immunoblotting experiments, preparation of cell lysates and electrophoresis are performed according to standard procedures. Protein concentration is determined using BioRad protein assay solutions. After semi-dry electrophoretic transfer to nitrocellulose, the membranes are blocked in 500 mM NaCl, 20 mM Tris, pH 7.5, 0.05% Tween-20 (TTBS) with 5% dry milk. After washing in TTBS and incubation with secondary antibodies (Amersham), enhanced chemiluminescence (ECL) protocols (Amersham) are performed as described by the manufacturer to facilitate detection.

### Example 6

### Generation of Antibodies Against Polypeptides

[0345] Polypeptides, unique to CA genes are synthesized or isolated from bacterial or other (e.g., yeast, baculovirus) expression systems and conjugated to rabbit serum albumin (RSA) with m-maleimido benzoic acid N-hydroxysuccinimide ester (MBS) (Pierce, Rockford, Ill.). Immunization protocols with these peptides are performed according to standard methods. Initially, a pre-bleed of the rabbits is performed prior to immunization. The first immunization includes Freund's complete adjuvant and 500 μg conjugated peptide or 100 μg purified peptide. All subsequent immunizations, performed four weeks after the previous injection, include Freund's incomplete adjuvant with the same amount of protein. Bleeds are conducted seven to ten days after the immunizations.

[0346] For affinity purification of the antibodies, the corresponding CA polypeptide is conjugated to RSA with MBS, and coupled to CNBr-activated Sepharose (Pharmacia, Uppsala, Sweden). Antiserum is diluted 10-fold in 10 mM Tris-HCl, pH 7.5, and incubated overnight with the affinity matrix. After washing, bound antibodies are eluted from the resin with 100 mM glycine, pH 2.5.

### Example 7

### Generation of Monoclonal Antibodies Against a CA Polypeptide

[0347] A non-denaturing adjuvant (Ribi, R730, Corixa, Hamilton Mont.) is rehydrated to 4 ml in phosphate buffered saline. 1001 of this rehydrated adjuvant is then diluted with 400 μl of Hank's Balanced Salt Solution and this is then gently mixed with the cell pellet used for immunization. Approximately 500 μg conjugated peptide or 100 μg purified peptide and Freund's complete are injected into Balb/c mice via foot-pad, once a week. After 6 weeks of weekly injection, a drop of blood is drawn from the tail of each immunized animal to test the titer of antibodies against CA polypeptides using FACS analysis. When the titer reaches at least 1:2000, the mice are sacrificed in a CO₂ chamber followed by cervical dislocation. Lymph nodes are harvested for hybridoma preparation. Lymphocytes from mice with the highest titer are fused with the mouse myeloma line X63-Ag8.653 using 35% polyethylene glycol 4000. On day 10 following the fusion, the hybridoma supernatants are screened for the presence of CAP-specific monoclonal antibodies by fluorescence activated cell sorting (FACS). Conditioned medium from each hybridoma is incubated for 30 minutes with a combined aliquot of PC3, Colo-205, LnCap, or Panc-1 cells. After incubation, the cell samples are washed, resuspended in 0.1 ml diluent and incubated with 1 μg/ml of FITC conjugated F(ab′)2 fragment of goat anti-mouse IgG for 30 min at 4° C. The cells are washed, resuspended in 0.5 ml FACS diluent and analyzed using a FACScan cell analyzer (Becton Dickinson; San Jose, Calif.). Hybridoma clones are selected for further expansion, cloning, and characterization based on their binding to the surface of one or more of cell lines which express the CA polypeptide as assessed by FACS. A hybridoma making a monoclonal antibody designated mAbCA which binds an antigen designated Ag-CA.x and an epitope on that antigen designated Ag-CA.x.1 is selected.

### Example 8

### ELISA Assay for Detecting CA Related Antigens

[0348] To test blood samples for antibodies that bind specifically to recombinantly produced CA antigens, the following procedure is employed. After a recombinant CA related protein is purified, the recombinant protein is diluted in PBS to a concentration of 5 μg/ml (500 ng/100 μl). 100 microliters of the diluted antigen solution is added to each well of a 96-well Immulon 1 plate (Dynatech Laboratories, Chantilly, Va.), and the plate is then incubated for 1 hour at room temperature, or overnight at 4° C., and washed 3 times with 0.05% Tween 20 in PBS. Blocking to reduce nonspecific binding of antibodies is accomplished by adding to each well 200 μl of a 1% solution of bovine serum albumin in PBS/Tween 20 and incubation for 1 hour. After aspiration of the blocking solution, 100 μl of the primary antibody solution (anticoagulated whole blood, plasma, or serum), diluted in the range of 1/16 to 1/2048 in blocking solution, is added and incubated for 1 hour at room temperature or overnight at 4° C. The wells are then washed 3 times, and 100 μl of goat anti-human IgG antibody conjugated to horseradish peroxidase (Organon Teknika, Durham, N.C.), diluted 1/500 or 1/1000 in PBS/Tween 20, 100 μl of o-phenylenediamine dihydrochloride (OPD, Sigma) solution is added to each well and incubated for 5-15 minutes. The OPD solution is prepared by dissolving a 5 mg OPD tablet in 50 ml 1% methanol in H₂O and adding 50 μl 30% H₂O₂ immediately before use. The reaction is stopped by adding 25 l of 4M H₂SO₄. Absorbances are read at 490 nm in a microplate reader (Bio-Rad).

### Example 9

### Identification and Characterization of CA Antigen on Cancer Cell Surface

[0349] A cell pellet of proximately 25 ul packed cell volume of a cancer cell preparation is lysed by first diluting the cells to 0.5 ml in water followed by freezing and thawing three times. The solution is centrifuged at 14,000 rpm. The resulting pellet, containing the cell membrane fragments, is resuspended in 50/1 of SDS sample buffer (Invitrogen, Carlsbad, Calif.). The sample is heated at 80° C. for 5 minutes and then centrifuged for 2 minutes at 14,000 rpm to remove any insoluble materials.

[0350] The samples are analyzed by Western blot using a 4 to 20% polyacrylamide gradient gel in Tris-Glycine SDS (Invitrogen; Carlsbad Calif.) following the manufacturer's directions. Ten microliters of membrane sample are applied to one lane on the polyacrylamide gel. A separate 10 μL sample is reduced first by the addition of 2 μL of dithiothreitol (100 mM) with heating at 80° C. for 2 minutes and then loaded into another lane. Pre-stained molecular weight markers SeeBlue Plus2 (Invitrogen; Carlsbad, Calif.) are used to assess molecular weight on the gel. The gel proteins are transferred to a nitrocellulose membrane using a transfer buffer of 14.4 g/l glycine, 3 g/l of Tris Base, 10% methanol, and 0.05% SDS. The membranes are blocked, probed with a CAP-specific monoclonal antibody (at a concentration of 0.5 ug/ml), and developed using the Invitrogen WesternBreeze Chromogenic Kit-AntiMouse according to the manufacturer's directions. In the reduced sample of the tumor cell membrane samples, a prominent band is observed migrating at a molecular weight within about 10% of the predicted molecular weight of the corresponding CA protein.

### Example 10

### Preparation of Vaccines

[0351] The present invention also relates to a method of stimulating an immune response against cells that express CA polypeptides in a patient using CA polypeptides of the invention that act as an antigen produced by or associated with a malignant cell. This aspect of the invention provides a method of stimulating an immune response in a human against cancer cells or cells that express CA polynucleotides and polypeptides. The method comprises the step of administering to a human an immunogenic amount of a polypeptide comprising: (a) the amino acid sequence of a huma CA protein or (b) a mutein or variant of a polypeptide comprising the amino acid sequence of a human endogenous retrovirus CA protein.

### Example 11

### Generation of Transgenic Animals Expressing Polypeptides as a Means for Testing Therapeutics

[0352] CA nucleic acids are used to generate genetically modified non-human animals, or site specific gene modifications thereof, in cell lines, for the study of function or regulation of prostate tumor-related genes, or to create animal models of diseases, including prostate cancer. The term “transgenic” is intended to encompass genetically modified animals having an exogenous CA gene(s) that is stably transmitted in the host cells where the gene(s) may be altered in sequence to produce a modified protein, or having an exogenous CA LTR promoter operably linked to a reporter gene. Transgenic animals may be made through a nucleic acid construct randomly integrated into the genome. Vectors for stable integration include plasmids, retroviruses and other animal viruses, YACs, and the like. Of interest are transgenic mammals, e.g. cows, pigs, goats, horses, etc., and particularly rodents, e.g. rats, mice, etc.

[0353] The modified cells or animals are useful in the study of CA gene function and regulation. For example, a series of small deletions and/or substitutions may be made in the CA genes to determine the role of different genes in tumorigenesis. Specific constructs of interest include, but are not limited to, antisense constructs to block CA gene expression, expression of dominant negative CA gene mutations, and over-expression of a CA gene. Expression of a CA gene or variants thereof in cells or tissues where it is not normally expressed or at abnormal times of development is provided. In addition, by providing expression of proteins derived from CA in cells in which it is otherwise not normally produced, changes in cellular behavior can be induced.

[0354] DNA constructs for random integration need not include regions of homology to mediate recombination. Conveniently, markers for positive and negative selection are included. For various techniques for transfecting mammalian cells, see Keown et al., Methods in Enzymology 185:527-537 (1990).

[0355] For embryonic stem (ES) cells, an ES cell line is employed, or embryonic cells are obtained freshly from a host, e.g. mouse, rat, guinea pig, etc. Such cells are grown on an appropriate fibroblast-feeder layer or grown in the presence of appropriate growth factors, such as leukemia inhibiting factor (LIF). When ES cells are transformed, they may be used to produce transgenic animals. After transformation, the cells are plated onto a feeder layer in an appropriate medium. Cells containing the construct may be detected by employing a selective medium. After sufficient time for colonies to grow, they are picked and analyzed for the occurrence of integration of the construct. Those colonies that are positive may then be used for embryo manipulation and blastocyst injection. Blastocysts are obtained from 4 to 6 week old superovulated females. The ES cells are trypsinized, and the modified cells are injected into the blastocoel of the blastocyst. After injection, the blastocysts are returned to each uterine horn of pseudopregnant females. Females are then allowed to go to term and the resulting chimeric animals screened for cells bearing the construct. By providing for a different phenotype of the blastocyst and the ES cells, chimeric progeny can be readily detected.

[0356] The chimeric animals are screened for the presence of the modified gene and males and females having the modification are mated to produce homozygous progeny. If the gene alterations cause lethality at some point in development, tissues or organs are maintained as allogeneic or congenic grafts or transplants, or in in vitro culture. The transgenic animals may be any non-human mammal, such as laboratory animals, domestic animals, etc. The transgenic animals are used in functional studies, drug screening, etc., e.g. to determine the effect of a candidate drug on prostate cancer, to test potential therapeutics or treatment regimens, etc.

### Example 12

### Diagnostic Imaging Using CA Specific Antibodies

[0357] The present invention encompasses the use of antibodies to CA polypeptides to accurately stage cancer patients at initial presentation and for early detection of metastatic spread of cancer. Radioimmunoscintigraphy using monoclonal antibodies specific for CA polypeptides can provide an additional cancer-specific diagnostic test. The monoclonal antibodies of the instant invention are used for histopathological diagnosis of carcinomas.

[0358] Subcutaneous human xenografts of cancer cells in nude mice is used to test whether a technetium-99m (^{99m}Tc)-labeled monoclonal antibody of the invention can successfully image the xenografted cancer by external gamma scintography as described for seminoma cells by Marks, et al., Brit. J. Urol. 75:225 (1995). Each monoclonal antibody specific for a CA polypeptide is purified from ascitic fluid of BALB/c mice bearing hybridoma tumors by affinity chromatography on protein A-Sepharose. Purified antibodies, including control monoclonal antibodies such as an avidin-specific monoclonal antibody (Skea, et al., J. Immunol. 151:3557 (1993)) are labeled with ^{99m}Tc following reduction, using the methods of Mather, et al., J. Nucl. Med. 31:692 (1990) and Zhang et al., Nucl. Med. Biol. 19:607 (1992). Nude mice bearing human cancer cells are injected intraperitoneally with 200-500 μCi of ^{99m}Tc-labeled antibody. Twenty-four hours after injection, images of the mice are obtained using a Siemens ZLC3700 gamma camera equipped with a 6 mm pinhole collimator set approximately 8 cm from the animal. To determine monoclonal antibody biodistribution following imaging, the normal organs and tumors are removed, weighed, and the radioactivity of the tissues and a sample of the injectate are measured. Additionally, CA-specific antibodies conjugated to antitumor compounds are used for cancer-specific chemotherapy.

### Example 13

### Immunohistochemical Methods

[0359] Frozen tissue samples from cancer patients are embedded in an optimum cutting temperature (OCT) compound and quick-frozen in isopentane with dry ice. Cryosections are cut with a Leica 3050 CM mictrotome at thickness of 5 μm and thaw-mounted on vectabound-coated slides. The sections are fixed with ethanol at −20° C. and allowed to air dry overnight at room temperature. The fixed sections are stored at −80° C. until use. For immunohistochemistry, the tissue sections are retrieved and first incubated in blocking buffer (PBS, 5% normal goat serum, 0.1% Tween 20) for 30 minutes at room temperature, and then incubated with the CA protein-specific monoclonal antibody and control monoclonal antibodies diluted in blocking buffer (1 μg/ml) for 120 minutes. The sections are then washed three times with the blocking buffer. The bound monoclonal antibodies are detected with a goat anti-mouse IgG+IgM (H+L) F(ab′)²-peroxidase conjugates and the peroxidase substrate diaminobenzidine (1 mg/ml, Sigma Catalog No. D 5637) in 0.1 M sodium acetate buffer pH 5.05 and 0.003% hydrogen peroxide (Sigma cat. No. H1009). The stained slides are counter-stained with hematoxylin and examined under Nikon microscope.

[0360] Monoclonal antibody against a CA protein (antigen) is used to test reactivity with various cell lines from different types of tissues. Cells from different established cell lines are removed from the growth surface without using proteases, packed and embedded in OCT compound. The cells are frozen and sectioned, then stained using a standard IHC protocol. The CellArray™ technology is described in WO 01/43869. Normal tissue (human) obtained by surgical resection are frozen and mounted. Cryosections are cut with a Leica 3050 CM mictrotome at thickness of 5 μm and thaw-mounted on vectabound-coated slides. The sections are fixed with ethanol at −20° C. and allowed to air dry overnight at room temperature. PolyMICA™ Detection kit is used to determine binding of a CA-specific monoclonal antibody to normal tissue. Primary monoclonal antibody is used at a final concentration of 1 μg/ml.

[0361] All publications and patent applications cited in this specification are herein incorporated by reference as if each individual publication or patent application were specifically and individually indicated to be incorporated by reference.

[0362] Although the foregoing invention has been described in some detail by way of illustration and example for purposes of clarity of understanding, it will be readily apparent to those of ordinary skill in the art in light of the teachings of this invention that certain changes and modifications may be made thereto without departing from the spirit or scope of the appended claims.

What is claimed is:

1. An isolated nucleic acid comprising at least 10 contiguous nucleotides of a sequence selected from the group consisting of the polynucleotide sequences of SEQ ID NOS: 5, 7, 9, 18, 20, 22, 24, 33, 35, 37, 43, 45, 51, 53, 59, 75, 78, 80, 82, 88, 90, 92, 94, 100, 102, 113, 115, 123, 146, 148, 150, 152, 154, 156, 158, 164, 170, 172, 178, 180, 186, 188, and 190 shown in Tables 1-21, or its complement.

2. A host cell comprising a recombinant nucleic acid of claim 1.

3. An expression vector comprising the isolated nucleic acid according to claim 1.

4. A host cell comprising the expression vector of claim 3.

5. The polynucleotide according to claim 1, wherein said polynucleotide, or its complement or a fragment thereof, further comprises a detectable label.

6. The polynucleotide according to claim 1, wherein said polynucleotide, or its complement or a fragment thereof, is attached to a solid support.

7. The polynucleotide according to claim 1, wherein said polynucleotide, or its complement or a fragment thereof, is prepared at least in part by chemical synthesis.

8. The polynucleotide according to claim 1, wherein said polynucleotide, or its complement or a fragment thereof, is an antisense fragment.

9. The polynucleotide according to claim 1, wherein said polynucleotide, or its complement or a fragment thereof, is single stranded.

10. The polynucleotide according to claim 1, wherein said polynucleotide, or its complement or a fragment thereof, is double stranded.

11. The polynucleotide according to claim 1, comprising at least 15 contiguous nucleotides.

12. The polynucleotide according to claim 1, comprising at least 20 contiguous nucleotides.

13. A microarray for detecting a cancer associated (CA) nucleic acid comprising:
at least one probe comprising at least 10 contiguous nucleotides of a sequence selected from the group consisting of the polynucleotide sequences SEQ ID NOS: 5, 7, 9, 18, 20, 22, 24, 33, 35, 37, 43, 45, 51, 53, 59, 75, 78, 80, 82, 88, 90, 92, 94, 100, 102, 113, 115, 123, 146, 148, 150, 152, 154, 156, 158, 164, 170, 172, 178, 180, 186, 188, and 190 shown in Tables 1-21, or its complement.

14. The microarray according to claim 13, comprising at least 15 contiguous nucleotides.

15. The microarray according to claim 13, comprising at least 20 contiguous nucleotides.

16. An isolated polypeptide, encoded within an open reading frame of a CA sequence selected from the group consisting of the polynucleotide sequences of SEQ ID NOS: 4, 17, 32, 42, 50, 58, 74, 77, 87, 99, 112, 122, 145, 163, 169, 177, and 185 shown in Tables 1-21, or its complement.

17. The polypeptide of claim 16, wherein said polypeptide comprises the amino acid sequence encoded by a polynucleotide selected from the group consisting of SEQ ID NOS: 5, 7, 9, 18, 20, 22, 24, 33, 35, 37, 43, 45, 51, 53, 59, 75, 78, 80, 82, 88, 90, 92, 94, 100, 102, 113, 115, 123, 146, 148, 150, 152, 154, 156, 158, 164, 170, 172, 178, 180, 186, 188, and 190 shown in Tables 1-21.

18. The polypeptide of claim 16, wherein said polypeptide comprises the amino acid sequence encoded by a polypeptide selected from the group consisting of SEQ ID NOS: 6, 8, 10, 19, 21, 23, 25, 34, 36, 38, 44, 46, 52, 54, 60, 76, 79, 81, 83, 89, 91, 93, 95, 101, 103, 114, 116, 124, 147, 149, 151, 153, 155, 157, 159, 165, 171, 173, 179, 181, 187, 189, and 191 shown in Tables 1-21.

19. The polypeptide of claim 16, wherein said polypeptide comprises the amino acid sequence of an epitope of the amino acid sequence of a CA polypeptide selected from the group consisting of SEQ ID NOS: 6, 8, 10, 19, 21, 23, 25, 34, 36, 38, 44, 46, 52, 54, 60, 76, 79, 81, 83, 89, 91, 93, 95, 101, 103, 114, 116, 124, 147, 149, 151, 153, 155, 157, 159, 165, 171, 173, 179, 181, 187, 189, and 191 shown in Tables 1-21.

20. The polypeptide of claim 16, wherein said polypeptide is expressed on a cell surface, wherein the CA protein selected from the group consisting of SEQ ID NOS: 6, 8, 10, 19, 21, 23, 25, 34, 36, 38, 44, 46, 52, 54, 60, 76, 79, 81, 83, 89, 91, 93, 95, 101, 103, 114, 116, 124, 147, 149, 151, 153, 155, 157, 159, 165, 171, 173, 179, 181, 187, 189, and 191.

21. The polypeptide of claim 16, wherein said polypeptide or fragment thereof is attached to a solid support.

22. An isolated antibody or antigen binding fragment thereof, that binds to a polypeptide according to any one of claims 16-20.

23. The isolated antibody or antigen binding fragment thereof according the claim 22, wherein said antibody or fragment thereof is attached to a solid support.

24. The isolated antibody or antigen binding fragment thereof according the claim 22, wherein said antibody is a monoclonal antibody.

25. The isolated antibody or antigen binding fragment thereof according the claim 22, wherein said antibody is a polyclonal antibody.

26. The isolated antibody or antigen binding fragment thereof according the claim 22, wherein said antibody or fragment thereof further comprises a detectable label.

27. An isolated antibody that binds to a polypeptide, or antigen binding fragment thereof, according to any of claims 16-20, prepared by a method comprising the steps of: (i) immunizing a host animal with a composition comprising said polypeptide, or antigen binding fragment thereof, and (ii) collecting cells from said host expressing antibodies against the antigen or antigen binding fragment thereof.

28. The monoclonal antibody according to claim 24, wherein the monoclonal antibody binds to the extracellular domain of the CA protein.

29. The monoclonal antibody according to claim 24, wherein the monoclonal antibody binds to at least one human cancer cell line.

30. The monoclonal antibody according to claim 24, wherein the monoclonal antibody is prepared by a process comprising:
(a) providing a hybridoma capable of producing the monoclonal antibody; and
(b) culturing the hybridoma under conditions that provide for the production of the monoclonal antibody by the hybridoma.

31. A hybridoma that produces the monoclonal antibody according to claim 24.

32. The antibody according to claim 22, wherein the antibody is a humanized antibody.

33. The antibody according to claim 22, wherein the CAP is expressed on a cancer cell surface but not on a normal cell surface.

34. The antibody according to claim 22, wherein the CAP is differentially expressed on a cancer cell surface relative to a normal cell surface.

35. The antibody according to claim 22, wherein the antibody is linked to a therapeutic agent.

36. The antibody according to claim 24, wherein the antibody is linked to a therapeutic agent.

37. A pharmaceutical composition comprising the antibody according to claim 22 and a pharmaceutically acceptable excipient.

38. A pharmaceutical composition comprising the antibody according to claim 35 and a pharmaceutically acceptable excipient.

39. A pharmaceutical composition comprising the antibody according to claim 36 and a pharmaceutically acceptable excipient.

40. A kit for detecting cancer cells comprising the antibody according to claim 22.

41. A kit for detecting cancer cells comprising the monoclonal antibody according to claim 24.

42. A method for detecting a presence or an absence of cancer cells in an individual, the method comprising:
contacting cells from the individual with the antibody according to any of claims 22 or 24;
and detecting a complex of a CAP from the cancer cells and the antibody,
wherein detection of the complex correlates with the presence of cancer cells in the individual.

43. A method for inhibiting growth of cancer cells in an individual, the method comprising: administering to the individual an effective amount of a pharmaceutical composition according to any of claims 37, 38, or 39.

44. A method for delivering a therapeutic agent to cancer cells in an individual, the method comprising: administering to the individual an effective amount of a pharmaceutical composition according to any of claims 37, 38, or 39.

45. A kit for diagnosing the presence of cancer in a test sample, said kit comprising at least one polynucleotide that selectively hybridizes to a CA polynucleotide sequence selected from the group consisting of the polynucleotide sequences SEQ ID NOS: 4, 17, 32, 42, 50, 58, 74, 77, 87, 99, 112, 122, 145, 163, 169, 177, and 185 shown in Tables 1-21, or its complement.

46. A kit for diagnosing the presence of cancer in a test sample, said kit comprising at least one polynucleotide that selectively hybridizes to the sequence of a polynucleotide sequence selected from the group consisting of the polynucleotide sequences SEQ ID NOS: 5, 7, 9, 18, 20, 22, 24, 33, 35, 37, 43, 45, 51, 53, 59, 75, 78, 80, 82, 88, 90, 92, 94, 100, 102, 113, 115, 123, 146, 148, 150, 152, 154, 156, 158, 164, 170, 172, 178, 180, 186, 188, and 190 shown in Tables 1-21, a fragment thereof, or their complement.

47. An electronic library comprising a polynucleotide, or fragment thereof, comprising a CA polynucleotide sequence selected from the group consisting of the polynucleotide sequences of SEQ ID NOS: 4, 17, 32, 42, 50, 58, 74, 77, 87, 99, 112, 122, 145, 163, 169, 177, and 185 shown in Tables 1-21, or its complement.

48. An electronic library comprising a polynucleotide, or fragment thereof, comprising a CA polynucleotide sequence selected from the group consisting of the polynucleotide sequences of SEQ ID NOS: 5, 7, 9, 18, 20, 22, 24, 33, 35, 37, 43, 45, 51, 53, 59, 75, 78, 80, 82, 88, 90, 92, 94, 100, 102, 113, 115, 123, 146, 148, 150, 152, 154, 156, 158, 164, 170, 172, 178, 180, 186, 188, and 190 shown in Tables 1-21.

49. An electronic library comprising a polypeptide, or fragment thereof, comprising a CA polypeptide sequence selected from the group consisting of the polypeptide sequences of SEQ ID NOS: 6, 8, 10, 19, 21, 23, 25, 34, 36, 38, 44, 46, 52, 54, 60, 76, 79, 81, 83, 89, 91, 93, 95, 101, 103, 114, 116, 124, 147, 149, 151, 153, 155, 157, 159, 165, 171, 173, 179, 181, 187, 189, and 191 shown in Tables 1-21.

50. A method of screening for anticancer activity comprising:
(a) providing a cell that expresses a cancer associated (CA) gene encoded by a nucleic acid sequence selected from the group consisting of the sequences SEQ ID NOS: 4, 17, 32, 42, 50, 58, 74, 77, 87, 99, 112, 122, 145, 163, 169, 177, and 185 shown in Tables 1-21, or fragment thereof;
(b) contacting a tissue sample derived from a cancer cell with an anticancer drug candidate; and
(c) monitoring an effect of the anticancer drug candidate on an expression of the CA polynucleotide in the tissue sample.

51. The method of screening for anticancer activity according to claim 50, wherein the CA gene comprises at least one nucleic acid sequence selected from the group consisting of the sequences SEQ ID NOS: 5, 7, 9, 18, 20, 22, 24, 33, 35, 37, 43, 45, 51, 53, 59, 75, 78, 80, 82, 88, 90, 92, 94, 100, 102, 113, 115, 123, 146, 148, 150, 152, 154, 156, 158, 164, 170, 172, 178, 180, 186, 188, and 190 shown in Tables 1-21.

52. The method of screening for anticancer activity according to claim 50, further comprising:
(d) comparing the level of expression in the absence of said drug candidate to the level of expression in the presence of the drug candidate.

53. The method of screening for anticancer activity according to claim 51, wherein the drug candidate is an inhibitor of transcription and further wherein the nucleic acid sequence is selected from the group consisting of SEQ ID NOS: 5, 7, 9, 18, 20, 22, 24, 33, 35, 37, 43, 45, 51, 53, 59, 75, 78, 80, 82, 88, 90, 92, 94, 100, 102, 113, 115, 123, 146, 148, 150, 152, 154, 156, 158, 164, 170, 172, 178, 180, 186, 188, and 190 shown in Tables 1-21.

54. A method for detecting cancer associated with expression of a polypeptide in a test cell sample, comprising the steps of:
(i) detecting a level of expression of at least one polypeptide selected from the group consisting of SEQ ID NOS: 6, 8, 10, 19, 21, 23, 25, 34, 36, 38, 44, 46, 52, 54, 60, 76, 79, 81, 83, 89, 91, 93, 95, 101, 103, 114, 116, 124, 147, 149, 151, 153, 155, 157, 159, 165, 171, 173, 179, 181, 187, 189, and 191 shown in Tables 1-21, or a fragment thereof; and
(ii) comparing the level of expression of the polypeptide in the test sample with a level of expression of polypeptide in a normal cell sample, wherein an altered level of expression of the polypeptide in the test cell sample relative to the level of polypeptide expression in the normal cell sample is indicative of the presence of cancer in the test cell sample.

55. A method for detecting cancer associated with expression of a polypeptide in a test cell sample, comprising the steps of:
(i) detecting a level of activity of at least one polypeptide selected from the group consisting of SEQ ID NOS: 6, 8, 10, 19, 21, 23, 25, 34, 36, 38, 44, 46, 52, 54, 60, 76, 79, 81, 83, 89, 91, 93, 95, 101, 103, 114, 116, 124, 147, 149, 151, 153, 155, 157, 159, 165, 171, 173, 179, 181, 187, 189, and 191 shown in Tables 1-21, or a fragment thereof, wherein said activity corresponds to at least one activity for the polypeptide listed in Table 23; and
(ii) comparing the level of activity of the polypeptide in the test sample with a level of activity of polypeptide in a normal cell sample, wherein an altered level of activity of the polypeptide in the test cell sample relative to the level of polypeptide activity in the normal cell sample is indicative of the presence of cancer in the test cell sample.

56. A method for detecting cancer associated with the presence of an antibody in a test serum sample, comprising the steps of:
(i) detecting a level of an antibody against an antigenic polypeptide selected from the group consisting of SEQ ID NOS: 6, 8, 10, 19, 21, 23, 25, 34, 36, 38, 44, 46, 52, 54, 60, 76, 79, 81, 83, 89, 91, 93, 95, 101, 103, 114, 116, 124, 147, 149, 151, 153, 155, 157, 159, 165, 171, 173, 179, 181, 187, 189, and 191 shown in Tables 1-21, or antigenic fragment thereof; and
(ii) comparing said level of said antibody in the test sample with a level of said antibody in the control sample, wherein an altered level of antibody in said test sample relative to the level of antibody in the control sample is indicative of the presence of cancer in the test serum sample.

57. A method for screening for a bioactive agent capable of modulating the activity of a CA protein (CAP), wherein said CAP is encoded by a nucleic acid comprising a nucleic acid sequence selected from the group consisting of the polynucleotide sequences SEQ ID NOS: 5, 7, 9, 18, 20, 22, 24, 33, 35, 37, 43, 45, 51, 53, 59, 75, 78, 80, 82, 88, 90, 92, 94, 100, 102, 113, 115, 123, 146, 148, 150, 152, 154, 156, 158, 164, 170, 172, 178, 180, 186, 188, and 190 shown in Tables 1-21, said method comprising:
a) combining said CAP and a candidate bioactive agent; and
b) determining the effect of the candidate agent on the bioactivity of said CAP.

58. The method of screening for the bioactive agent according to claim 57, wherein the bioactive agent affects the expression of the CA protein (CAP).

59. The method of screening for the bioactive agent according to claim 57, wherein the bioactive agent affects the activity of the CA protein (CAP), wherein such activity is selected from the activities listed in Table 23.

60. The method of screening for the bioactive agent according to claim 57, wherein the bioactive agent is a modulator of an activity selected from the group consisting of: G-protein coupled receptor, tumor suppressor, nucleic acid binding, calcium binding, cell cycle regulation, mitosis, cell motility, electron transfer, and nucleotide binding.

61. A method for diagnosing cancer comprising:
a) determining the expression of one or more genes comprising a nucleic acid sequence selected from the group consisting of the human genomic and mRNA sequences outlined in Tables 1-21, in a first tissue type of a first individual; and
b) comparing said expression of said gene(s) from a second normal tissue type from said first individual or a second unaffected individual;
wherein a difference in said expression indicates that the first individual has cancer.

62. A method for treating cancers comprising administering to a patient an inhibitor of a CA protein (CAP), wherein said CAP is encoded by a nucleic acid comprising a nucleic acid sequence selected from the group consisting of the human nucleic acid sequences in Tables 1-21.

63. The method for treating cancers according to claim 62, wherein the inhibitor of a CA protein (CAP) binds to the CA protein.

64. The method for treating cancers according to claim 62, wherein the inhibitor is a G-protein coupled receptor protein inhibitor and further wherein the CAP sequence is selected from the group consisting of SEQ ID NOS: 6, 8, 10, 19, 21, 23, and 25 shown in Tables 1-21.

65. The method for treating cancers according to claim 62, wherein the inhibitor is a nucleotide binding protein antagonist and further wherein the CAP sequence is selected from the group consisting of SEQ ID NOS: 34, 36, 38, 101 and 103 shown in Tables 1-21.

66. The method for treating cancers according to claim 62, wherein the inhibitor is a calcium binding protein antagonist and further wherein the CAP sequence is selected from the group consisting of SEQ ID NOS: 187, 189 and 191 shown in Tables 1-21.

67. The method for treating cancers according to claim 62, wherein the inhibitor of a CA protein (CAP) is a nucleic acid binding protein antagonist and further wherein the CAP sequence is selected from the group consisting of SEQ ID NOS: 52, 54, 165, 171 and 173 shown in Tables 1-21.

68. The method for treating cancers according to claim 62, wherein the inhibitor is a cysteine-type peptidase antagonist and further wherein the CAP sequence is selected from the group consisting of SEQ ID NOS: 89, 91, 93 and 95 shown in Tables 1-21.

69. The method for treating cancers according to claim 62, wherein the inhibitor is a modulator of signalling or signal transduction and further wherein the CAP sequence is selected from the group consisting of SEQ ID NOS: 28, 30, 38, 44, 46, 48, 50, 56, 58, 60, 62, 64, 72, 74, 76, 94, 116, and 144 shown in Tables 1-21.

70. A method for inhibiting expression of a cancer associated (CA) gene in a cell comprising:
contacting a cell expressing a CA gene with a double stranded RNA comprising a sequence capable of hybridizing to a cancer associated (CA) mRNA corresponding to the polynucleotide sequences of SEQ ID NOS: 5, 7, 9, 18, 20, 22, 24, 33, 35, 37, 43, 45, 51, 53, 59, 75, 78, 80, 82, 88, 90, 92, 94, 100, 102, 113, 115, 123, 146, 148, 150, 152, 154, 156, 158, 164, 170, 172, 178, 180, 186, 188, and 190 shown in Tables 1-21, in an amount sufficient to elicit RNA interference; and
inhibiting expression of the CA gene in the cell.

71. The method of claim 70, wherein the double stranded RNA is provided by introducing a short interfering RNA (siRNA) into the cell by a method selected from the group consisting of transfection, electroporation, and microinjection.

72. The method of claim 70, wherein the double stranded RNA is provided by introducing a short interfering RNA (siRNA) into the cell by an expression vector.

The application's sequence listing, which the Patent Office published only in electronic form, follows.

SEQUENCE LISTING (191 sequences)

SEQ ID NO: 1 - DNA, 14064 bp, Mus musculus
cctgcctggccccacggcagcagctcgcaagcaatctaaattgctttcctggattccactactggacttgccccctgaaggcgctggagggagcagctgctctggcaagcaccccctgctagggcaggtgaggcacagaagcaccgagagcgaccggatattgtagtgaagaggccactgtacgtacaggcaggagacccaaacaagtctgtccttggtgcgagttgggggccggaagggagctctggatttcggtccctccccttttccctgctctgtcttggagccctggggccatcagaccctccgactgtctggtacttgcctggaagagatatcatctctcctccacaccctccaccatggacaattttcttaatgactccaagctaatggaggactgcaagagtcgtcagtggctcctttcgggggaaagcccagccatcagctcggtgatgttctcggccggggttctggggaatctcatcgcactggcactgttggcgcgccgctggcgtggggacaccgggtgtagcgccggcagcaggacctctatctccttgtttcacgtgctggtaacggaattggtgctcactgacctgctgggaacctgcctcatcagcccggtggtgctggcttcatattcaagaaaccagaccctggtggccctggctcccgaaagtcacgcgtgtacctatttcgctttcactatgaccttctttagtctggccacgatgctcatgctcttcgctatggccctggaacgctacctctccatcgggtacccttacttctacaggcgccacttatcgcgccgcgggggtctggcggtgctgcctgtcatctatggggcctccttgctcttctgttccctgccgctgctcaactacggggagtacgtccagtactgtcctgggacatggtgctttatccggcacgggaggactgcataccttcagctgtacgccacgatgctcctgctgcttatcgtggctgtgctcgcctgcaacatcagcgttatcctcaacctcattcgcatgcaccgtcggagcagaagaagccgctgcggattgtctggcagtagcctaagaggccctggatctcgcaggagaggagagaggacttcgatggcagaggagacggaccacctcattctcctggccattatgaccatcaccttcgccatatgctccttgcctttcacagtaagtcacctttgtttccacagccccgcaagcagcccgcgcagcctgctcaaactcctctcaccccaccctttccacctttaggcacagcctgggtgggaaatgtcttaattgacaaaggtcaattgccttcccctttccttttcaccttacccacttccttccttcctcctcctgtctttgcatatgactgttgctacttagcacttcttctaagaacctgcttggtctcttccctgggttggtaactgaagaggagggagtccctcccaagataggatgttgacaatgttataatctgatcactggggcccactttgctatccttgaggccccttctcttggtgctttcatttctcctgagcaaaatgtagttgtcaacacacagcattcagaaggcccttggtgtagaaggttacagcctctttcatttgactttaggaacattaagttacaaaattgtttcttgatgtcactgtcaggagcacacatagatgctcctcattctgtagctgtgcactttgtgagcacatagataaattcagtaacagctggaacatctcagggatgagggaaaaggttgcttggggaactgaggcagggccaggatagaaacatgggtgttgctcagttagaggcagcattgacagtgagatctgaaataaatgctgagctgctaaagcctaatgtggatgcacagccaaagttgaagccttctggtccttcataaagaactatagaaggggggtttgggaaaggacagcatggagagtgtctagtcagagatctgaagcagtagaaatagctcttctctgtttctcatggatgtttctgattggtgccatctattcatcctcaaggggaaagatcagaaccccgtcaccaagggacttcccttctcagctgtgctctgctccccattgccctcacacttgtccttttcttctctcctctaccacagaagatggtctgaactggcaagttatacttagtggggaatgctatggagctggtcacaccgccctcttaaataacgaattggactgtggaagctggcatctccatagctactccagaaggagagtttgtgttggggaatgttgtgatttaaccagaacgtggctcctgtgcttttgtgttttatgtttggggctgcattagcttttggaggtggggctaggatgctgaccattatctctaaaagaaggcacttctagtctcactaaacaagactccaaccattctacaatgtgtctgtcttaggctgctgggaattaggatgtctgctctaagaacttgatctgtgatttgtaagtaaacgtataaaagtaccaggagctacttatgtagcctgagaatgggctctatgctggcccaaacacttatacaaaggattgtttctccattcctaatccactgaaaagaagctagtggacagaaaaatggctcctcttcaactggaaaacttggtaaagtatattttaaaatataaaagttgtgaattacagcagatcccctgtgctcttgtaaagtgttgcctttaatcgtgaaggatcaattattgccatatatactcccctccttacatcgctactgtagtttcccctccctcctctgctcccagctccttcccccacctcccttctaccccttcctcccaaccatgactcctctgtttctcttcagaaaaggacaggcctcccctatggatatcaacaatacagcatacatatcaagttgtagtaagtaataccccttgtattaaggccagatgaggcaacccagtaggagagggtgtcccaaaagcaggcagattcagagatagcccttactcccactattaggaatcccacaagaaaaccaagctacacaagctgtacaacatatatgcataggacctaggtcagttccataccagctcctggttctctattcagtggctgtaagccccagtaaacccaggtttgttgattttgtgggttttcttgttatcctctcccttttaatatcagtccagacatggccccagaattgccaaaagaaaggacttggcaccaaaattctcttcaaaaggatgagaaagtcaagcttgctttgaagttctgcccttgttcagtttctatttgcggctggtagggggaggggcacaccaagaaagttttaaatggattctacaccaaaccatcccttagcatgggcaccatcagcaagccctgctctaggtttgcttctgccaagcccatggcagagattcccaatgagcagagagagtctcactatgagtatagcagaaggccaataccctgccttgccttgaggatcaccacaacatcacagctacacaaactacagataatccaggaggcgcagtaccaaactgaagcatcacgccatctctcctgaaaataaataaatttaaaaaatcaactttgcccgttgacaacttttattttgataatatgttatctttccaccacatactatgttcagctttaggaactactgagctattctgatatattacttcagggatgatatgacagttcaaaactcatggctaatgttcacacatttcctcccaagttcttcgaccctacttgggccacactaaaatatggccaatgcagagctcccacttgagtaggaatcctttgcacaaaaggagggtgaggctcacaaatgcactcaggcacttgattcttttagcaccatcgacatgcaatcaatgcataccacaaatatgagatgcacatgttgaagctatacgtgctgaaaatgaaaccaaaaacttttattttaattacatatttgcttaactcaatctaccagaatagtatcgataatataacaaaggttattcatgtaaaatatttgcccattctacctaattatttttctcatattctcaaatacagcagcaacccatcattttcctcccgttttttcactcagaatagcaagaactgttttctgcgttcctgaaagtgagtcagacctctggacagcaaggagaagccttcacggccacagctggtggaaccccggtcaattctgcagctctctggcaaagctggaagctggagcttaggaaatctagaatcggtagtgaactcctaatggcattccccaccccaggttatgaacggagaagaattgcttcttccttctaggatgtcagtctaggacctcccaaattcaggaaataaaactcttaaaatggaaaataaatccccaataccctaaagtaaagtcaagttcagcctcatgtatcattactgttacacccgaaagactcggagtctgagtgtttacttttacctcaattcattattttctccatgacctccaagacatttaatatgattcccataatgcagacgagtcaagtaacttcctcccgggcctacagtgagggaaccacagagctggggtgggaagtcagaagccccgagaccactatgtattagtagcaataatgtccagaagaaattcctcctttcaggagaaacacgagaggagatccaaccatgctttcacaagagaattttagcagtattataaatatttggaccaccttgtctctttataccaacttattagttttaaaaataaatcagtagggatttttttttcctccgtgttatttcagtcatgttccattttccctcagtcctgctacatgtaaccctgggactgagattttaggagattgctctagtaaatgctagtttatatcaagatacaatcggattacccctcacataaaacctttatgtgatgcccataaaatatttctttagtgattagaaaagcatatggtgtttaggaaatgacattactttgactgcccagtatgaaatcacgcatgagaccaacaacatagaccaaactgtttattcactaaatgagcagcatataaattaactcctcgtgtcaatcagttattgtcatcatttcacagtgataaatagaaactctttttcttccagaaaaggaacagactgcgggaaacaataagccctccagccttgtctcagatcctgcttgtgtctccatttcccacccacattcactcactttctcagcccttggctaactgtggttagtttctgatcattttaaactgttctccacatgccattaggataaagtgcttatgccttttattcagttctgaaatttcaagagcctaccattggctgaatctaaaaatatctttatcttcacaaattctccatggttagaatttctaagtaaatctgattagtggaaatctgatctttacactatagaaaatgttgaagtaaacaatcctggagtttcctgttcattcctgctgtttcttgtgtaaaatgtcatgtaaatgaatggtgaaagtcttgtatgaaattagccaatcacgaggatatgaactataaaagttcaggtagtgagtaaaaaaacaaaaaagccagtctatgatggctcatacctctaatcccagcactcaggaggcaaaagtaggtggatctctgagttcaaggccaacccctctacagagctagttccaggacatcctgggttactcagagaatccttgtctcaaaaaacaaaaacaaaagaagctcagatagagataaaagagaaatttacacatctctgggtgtccacatggaactgattgtgatgatatagaagtgaatgcttgtgaacaactggaatgccctttgtcattgagacatcattagtgatgtgtttgacaattgttggcagcatttaaatgcacatttccttttaagagaacattcctttgtgtgagtgatttcaattggtatcttttacttcaccaatttgctaatgtcccatggtgcctgtaagtaaaagcacagataggatggttttgatatgcagtatgcatgaagcatcatctgtttcccaacacagaatttgagctttataactacaccttcagttaagtggatcttcactgttgtttcaggccagttcttctgctcaacaaacaaacaaacaaaccaatcaatagcccctcacagtatgaacttaaaaacaagtcaacaccatgattcaggaatgtagtcaacagttccttttccaggtagaggcttaaccccagttaatctgcaacttgttctacttgcttggcctctcctgtcccctgctttgagtttctgaccaacagtcctcatccagatctcgaacctaagtcttctgtatctcaacctaagtctactgcatcttaacctgtctactgcatctcaactaagtctactgcatctcaactaagtctactgcatctcaactaagtctactgcatctcaactaagtctactgcatctcaactaccatcactgggcttcactaagctacctacacttttctgacagcattttgctccctaaaagtgttccataaattaaaaccagagttaggcattctgaaattaggacgtgtgtgatgaatagggcctgaaaaggggaaagaggacctagggaaggctgagactccctgtgctgatttctgctccgtggatggtgcatgtggtgctgcccaggctgtgaccgagcttgctgtctctgtcagtcaggaagctgaaggcagggaaatctccagtgtagcagggagaaccagggaaaagtctcagacccagcgggcagagtcagcaggtgaagaaaggcttctattagaggtgaggaagcacacagagaaagccgattcacagaaaagaggctctgcaaagcaccggggagctggggcgctgaagctccctctcccagaggctgggtttaagggtctgtgaaggaatttcctcctctaatctagtgtttgttagtttggacagagacagggaggctggtccttccacaagtctggcgtaaacatgtccagctccagccttgaacttgtctagctggtccttcagaatgtgcatgtggggaaagacaagtctttaggcctttgtcttcagtcatgtttatgaagaaaaagctggaagtttgctaaccttacttactatctatttgtgactcctttccctgtctgtctacctatcagagacctgcctgactccctcctagcctctcacatagatcactccaaaagtcacctgcagactaggattagaggactctgagtggatggctcatactggccatcatttccttagagctctagatgttagcactcggccttcatttcagttcccagatgtacagtgccaaggccatgatcattctggagccataatgataccccagttgttcttatgatgtagcatagacatcaggtcagtttccatgtaccatagacatgtttaggaagaaaaaaaaatttttaaagcatggtcccatcccccccccaaaaaattttttttaatttaattgtggaaagcctgcagttaggacaccacaatatcattcagaaggtggaagaactcagcaagtgctgcctgcaagttagctgacgggaagtattgataagaaaaaaaagtcacaggttttccatctctaaacagaagagtgagagccacaggccttcatcaaacccttcaacaaaagtgtctgcatacatcgtgtccaagtagtcacctgtgaatctcacatgaagctttagcctttctaaggaggtatcagaatagtgtctagggactggcattgaagctggagccctacctcagcagtctgattccatatacaaagtaactactctttaaaccttggcttctcctctctaaaaggagtctgcattccatggggaggttttaagccccccaaagtccatgccttggccaagactgaataagtcaaagaagcaatgcaactgaatgtattaagtctctcctggggatttcacagatgagcccaataaagtgctgatacccacttagtatcagataaaatatagggaagtagtttaaatgacagtccctggccactgccaagatgaaactttccatggatgcttgcctcggacatggctgaaacagaagatggccatctgtgccaccagatatgtgtctcacctctgttgtctttgcaaaacctgttgtaggggtggagctcaagcagttagctcacgtaacacattagactagcacctggtatccttctcacagcaagtatattggtactgtatgccagaaggcccatgtgttcccaccaatctctgaatttgaactttagaacgtcaccaatatatcactcagtaattcctgtgtctcccatatgtcagctgtttgttaagaaccaagggtgatctctggggaaggagtaagttcacctgcatggagattcacactttcagtttggaggcaggtgatggtgatgggtttttagtttgtttgtttttttgttttttttttttttgttttgttttttttatgtttagctcagtcaagagcatttccaagaggagactcatgagaaatccagccaaggccggtatacctgtcaggatgcagaagagggagggggaatgatagggtctgttctgtggcctttattagggtttctacaggaaagacatgtcaagataaaaggattatgattggcaaacttgtataattgtggcaggttgtcagccacaggtctgtccttggttgactggtaacagagctctggaccatgaaggaggagaacattactatgggttatgggctccgtagatgaggtaggtctcagaactaactggttagtaatgtgtatagcaaagacatactccctgttgagtcctttgttggttgcagtaattactcattccaagaaggggcatctccccagacacagacttttagatatctaaacctcagaatagagttgggagtaaagctcagtggtagaatgcatgccaagcacaagtgaggcactaagttcaagactgagcaaggccaagaaaaacattcacatcataaaatatcataatataaaaaaattatagttacatgagcattgaatgaatgtacttagtggcactaaattgtgcacctgaaagtgctaaaatgggctgggtgtgatggcacatgcctttaatcccagcacttgggaggcagaggcaagtgggtttctgagttcgaggccagcctggtctacaaaatgagttccaggacagccagggctacacagagaaaccctgtctcgaagaaaacaacaacaacaacaacaaagtgctaaaatgggctctgtgcccacagctgatcctgtgccacatacccaaatactgccaggagagagctggtctccaaggagtgccgacacacctgtgagcacaggtaagaccaccacttctgttcaaattcctggtccaagagggactctttcagagccatcaggacaaggaacagccagggacaggatctttctggtttctatctgcaccctggagctgaccctataccacagctctccatacccaaattcctcccagaaagaactggtctcccaggagtactgacacaggcttgcaggagggacaagccacacagtcagagacagcaagaccagctaacatcagagataatcagatggcaagaggcaagggcaagaatataaacaacagaaatcaaggctatttggcatcatcagaacccagttctcccaccatagcaagtcctggatatcccaacacacaaaaaaagcaagactctgatttaaaatcacatttcaagattatgatagagaactttaagaaggacataagtaactcccttaaagaaatactggagaacacggttaaacaggtagaagccctaaaagaagaaacacaaaaatcccttaaagaattacaggaaaacacaaccaaacaggtaaaggaattgaacaaaaccatccaggatctaaaaatggaaatagaaccaataaaaaagaatcacaaaggaagacagccctggaaatagaaaacctagaaaagaggtcaggagtcatagatgcaagcattatcaacaaaatacaagagatagaagagagagcctcaggtgcagaagataccatagagaacattgatacaacactcaaagaaaatgcaaaatgtacaaagctcctaacccaaaacatccaggaaattcaggacacaatgagaagaccaaacctaaggataataggtatagaagagaatgaagattcccaattttaagggccagtaaatatcttcaacaaaattatagaagaaaacttccctatcctaaagaaagagatgcccatgaacatctacaagaagcctacagaactccaaatagattggccagaaaagaaattcctcctgtcacctaatagtcaaaacaccaaatgcactaaataaagaactaatattaaaagcagtgaggggaaaaggtcaaataatatataaaggcagacctgtcagaattacaccagacttatcaccagagactatgaaagctagaagatcctgggcagatgtaatacagaccctaagagaacacaaatgccagcccaggctactatacccagcaaaactctcaattaccatagatggagaaaccaagatattccatgacaaaaagaaatttacacaagatctttacacaaacccagtccttcaagggataataaatggaaaactccaacacaaggagtttaactacagcctagaaaaaggaagaaaataatctttttttttaaacaaacccaaaagaagatagcctcacaaacataaaaataaaataaaaaataacaggaagcaacagtcactatttcttaatatctcttaatatcaatggactcagttccccaatgaaagtcctaaaatggtatgtttttatgttatgtggatttcagcaaaacttaaaataacattgaatccagactgcacaacagcaatcatataaattccagtaagaaaattttaaaagtgaaggagaggcagaagacaaagctcccatcaaaagcctagagtgttaaaggtgtctgaagtcaacctctctttgaaatgtaaaagaattgaatcatctcctacaaagtattgactaccctctaaaatgcatattttaggcaattctaaaacttgcccaccatagtggataaaagagaaaagaaacagcacagaatttctccatctttgagccaattctcacatctcactatcctgttacactctacaagattagaaacaatgatgtaggttatcctgtgctgcaaacctggctcattttcatgggtggagctgggaggctgaggatgctgaaccccatcctcggagcttgctttgcatgctcaactcaccattactgtctcccctgataaattggatcggagacagctatgggtttttctacaacagagtgttattatctgtgcatacggtgtgtgtgtgtgtgggggggggggtgtgtgttttaatctatcagaattatgcacactattactgaatggttccctcaaaactcccctcctgaacacatcatactgaacattttgcatccaacataatgtaacagactagaagactgttgtcccattgcattgcattacacagccccacctaacccttctctgagctctggaaagcccacagtcaattcttctttttccttactcatctgccaactcttttctccactcattatgccaagattctctggcataaacacctctggctgccaaacctttctgctattgtcttaacataagcagcccaaagatgactgcctttctctctccctacaatttgtttagcacatccagttcccagatgctgtggagggagtaccagggtaaagggaagagattattttgggaaaagagtgttggggaagaattggatagtttccctaagtcacagacaaggccagaaggtccctggagcattaagaataagtgtgttagttaaatgatgaggtgtgatccacatttggactcctttctgtaggctggaatgaagaatcatggctcccaagtatgtactgttccctgaccaaatcgctgcattgagtcagatgagaataccaataccagtttgaaaatcctggtctacatataaggatttatattcacttcccagagtttaggacaccattctgaaaggctgtggtgtaattctgacctgggtataacaccaagtgaatgttgtactagcattagaagtcatgagcttgtactcttactaggccacaaaacagccttaggtccacggcaagttccctgagtctttgctgcccctgtgttctcactggtgaaatgaggtcacaactcacttactttgtaaagcaccgattatatgcgcactgttgaagcaactaacatgttgcttaagacgagcatgtgaagtagatgtgatatcaccttcttttacacactcacaagtttcttgtccatgataccaaagttacacacagagttaaatttaagccccaccgctgtgatactcagaacctgtcctccaactaatgtgctttgttgctctcttgtagaaccgtcaggtcaggtatttgggaatgtaaaaatgttcttaacattcccagaacttacttcttcatctgttacacttctcattaggacctggcacatttcacaacacacatatcaggtaaataatagctactaatactaccactgctggtattattaaaatactctatttgtcaaggcatggtggctcacacctgtaatcctatttggggggtagggggttataggcagatcgtgtgtttgaagacagtttggattatataatgagaccatctgaggggaaaacagattctattctagatgccatctccctccattcccaatgacaagactgaaagttttgtgagatgttaacattaatgccaaccttagaatgcatgctttcttaaagttcatgggaaaatgatgatgatttgtgtagaagatttcttgccacccaccctttcattgccactagaaacaacagagtatctaaactggcttgttcacagtgtagacctaacattgttttcctctctgcttctttcagatctttgcctacatggatgaaacctcttccctaaaggaaaagtgggacctccgagctcttcggtttttatcagttaactctataattgacccttgggtctttgccatacttaggccaccggtcctgaggttaatgcgctcagtcctctgttgtcggacttcactgagaacacaagaagctcagcaaacatcctgttctacccagtccagtgccagtaaacagactgacctttgtggacagttgtgaggatgcgcttcacgagggaacctctgaagaagtctttaaatggcctcattggagaagtgtaaggggctggaatataaacagaataaccttgccctgagaagcagatgaaacagactttatgaggtttgggctgcagatgtgatgacagagccctttgtggaaagtgtcagaggatataaagttcacattatgtgacctttgaaggacaatctgctgcgtcgaagacccagttgatttaagctttcctgttgagtgacaaagcatgtggttttgtaatttgttttaaaatgctacatggttactgttttaattttgatgtcactgctgttataaatgcagtcagaccaaatgaaattcattctctaggaagtcaactcatgcaagcgatgaagcaaccagagcagacaagttgctgtctcgtgattgcttaatggactctttatttggaccatgaagttgaatgccattggccccttttactgtgcgcgttcatgtgggagtcctctctggtaacgaaaggatgcactgatttggttaatgctagttaatcctttaggagctctgtcatgttgtcagattatttattctgtcttgtctattgtgataaggctactgaagaaaacttcagaaatttgcgtctcacaaaggaataattaaaaaaatcaatttt

SEQ ID NO: 2 - DNA, 2121 bp, Mus musculus
cctgcctggccccacggcagcagctcgcaagcaatctaaattgctttcctggattccactactggacttgccccctgaaggcgctggagggagcagctgctctggcaagcaccccctgctagggcaggtgaggcacagaagcaccgagagcgaccggatattgtagtgaagaggccactgtacgtacaggcaggagacccaaacaagtctgtccttggtgcgagttgggggccggaagggagctctggatttcggtccctccccttttccctgctctgtcttggagccctggggccatcagaccctccgactgtctggtacttgcctggaagagatatcatctctcctccacaccctccaccatggacaattttcttaatgactccaagctaatggaggactgcaagagtcgtcagtggctcctttcgggggaaagcccagccatcagctcggtgatgttctcggccggggttctggggaatctcatcgcactggcactgttggcgcgccgctggcgtggggacaccgggtgtagcgccggcagcaggacctctatctccttgtttcacgtgctggtaacggaattggtgctcactgacctgctgggaacctgcctcatcagcccggtggtgctggcttcatattcaagaaaccagaccctggtggccctggctcccgaaagtcacgcgtgtacctatttcgctttcactatgaccttctttagtctggccacgatgctcatgctcttcgctatggccctggaacgctacctctccatcgggtacccttacttctacaggcgccacttatcgcgccgcgggggtctggcggtgctgcctgtcatctatggggcctccttgctcttctgttccctgccgctgctcaactacggggagtacgtccagtactgtcctgggacatggtgctttatccggcacgggaggactgcataccttcagctgtacgccacgatgctcctgctgcttatcgtggctgtgctcgcctgcaacatcagcgttatcctcaacctcattcgcatgcaccgtcggagcagaagaagccgctgcggattgtctggcagtagcctaagaggccctggatctcgcaggagaggagagaggacttcgatggcagaggagacggaccacctcattctcctggccattatgaccatcaccttcgccatatgctccttgcctttcacaatctttgcctacatggatgaaacctcttccctaaaggaaaagtgggacctccgagctcttcggtttttatcagttaactctataattgacccttgggtctttgccatacttaggccaccggtcctgaggttaatgcgctcagtcctctgttgtcggacttcactgagaacacaagaagctcagcaaacatcctgttctacccagtccagtgccagtaaacagactgacctttgtggacagttgtgaggatgcgcttcacgagggaacctctgaagaagtctttaaatggcctcattggagaagtgtaaggggctggaatataaacagaataaccttgccctgagaagcagatgaaacagactttatgaggtttgggctgcagatgtgatgacagagccctttgtggaaagtgtcagaggatataaagttcacattatgtgacctttgaaggacaatctgctgcgtcgaagacccagttgatttaagctttcctgttgagtgacaaagcatgtggttttgtaatttgttttaaaatgctacatggttactgttttaattttgatgtcactgctgttataaatgcagtcagaccaaatgaaattcattctctaggaagtcaactcatgcaagcgatgaagcaaccagagcagacaagttgctgtctcgtgattgcttaatggactctttatttggaccatgaagttgaatgccattggccccttttactgtgcgcgttcatgtgggagtcctctctggtaacgaaaggatgcactgatttggttaatgctagttaatcctttaggagctctgtcatgttgtcagattatttattctgtcttgtctattgtgataaggctactgaagaaaacttcagaaatttgcgtctcacaaaggaataattaaaaaaatcaatttt

SEQ ID NO: 3 - protein, 358 aa, Mus musculus
MDNFLNDSKLMEDCKSRQWLLSGESPAISSVMFSAGVLGNLIALLARRWRGDTGCSAGSRTSISLFHVLVTELVLTDLLGTCLISPVVLASYSRNQTLVAPESHACTYFAFTMTFFSLATMLMLFAMALERYLSIGYPYFYRRHLSRRGGLAVLPVIYGASLLFCSLPLLNYGEYVQYCPGTWCFIRHGRTAYLQLYATMLLLLIVAVLACNISVILNLIRMHRRSRRSRCGLSGSSLRGPGSRRRGERTSMAEETDHLILLAIMTITFAICSLPFTIFAYMDETSSLKEKWDLRALRFLSVNSIIDPWVFAILRPPVLRLMRSVLCCRTSLRTQEAQQTSCSTQSSASKQTDLCGQL

SEQ ID NO: 4 - DNA, 15097 bp, Homo sapiens
tcagtacaccggcaacacgcgcgcctctgcccagtgccgcgcccagcgggtgctcagactccttctctccctccccgccggcgcaccccagggactcggaacgcccccgcgagtgtgacgcgtcctgcctcccctgcagctcgcggacactcgcacttgcaaggcctggccagcactcttgggcccgccccccgacagtgcgggggcggagacgacggctcccctaggctctggctcccggccttggccggcgcgggtaggcgcgggagcctcgagcgccgctcggatgcagcagccgagccgccactcggcgcgcggcgggagacccagggcaagccgccgtcggcgcgctgggtgcgggaagggggctctggatttcggtccctcccctttttcctctgagtctcggaacgctccggctctcagaccctcttcctcccaggtaaaggccgggagaggagggcgcatctcttttccaggcaccccaccatgggcaatgcctccaatgactcccagtctgaggactgcgagacgcgacagtggcttcccccaggcgaaagcccagccatcagctccgtcatgttctcggccggggtgctggggaacctcatagcactggcgctgctggcgcgccgctggcggggggacgtggggtgcagcgccggccgcaggagctccctctccttgttccacgtgctggtgaccgagctggtgttcaccgacctgctcgggacctgcctcatcagcccagtggtactggcttcgtacgcgcggaaccagaccctggtggcactggcgcccgagagccgcgcgtgcacctacttcgctttcgccatgaccttcttcagcctggccacgatgctcatgctcttcgccatggccctggagcgctacctctcgatcgggcacccctacttctaccagcgccgcgtctcgcgctccgggggcctggccgtgctgcctgtcatctatgcagtctccctgctcttctgctcgctgccgctgctggactatgggcagtacgtccagtactgccccgggacctggtgcttcatccggcacgggcggaccgcttacctgcagctgtacgccaccctgctgctgcttctcattgtctcggtgctcgcctgcaacttcagtgtcattctcaacctcatccgcatgcaccgccgaagccggagaagccgctgcggaccttccctgggcagtggccggggcggccccggggcccgcaggagaggggaaagggtgtccatggcggaggagacggaccacctcattctcctggctatcatgaccatcaccttcgccgtctgctccttgcctttcacggtaagtcactccctacgtttccacagcccggctctgctcagccttctcatgctctcccctgacgcctccaccctttccaccgccctacaaactttttgcaacttgtaaaaatatgtcctaatttgtaaagatctgtagccttccccactagtttcccctcctctttagcccacttccttatcctggcttatgggcgttgctaggctagagtttcttatacaataatacagaccgtccgaaagggagtcctgggcctcagctaagctagccaatctcctcatcctagccctgggcagtgtccctttctcgctgttgcctatcttggcttagtaattgagaaagaggcagccccttccaccttaggatggctgtcactgttccagcctgacgacctggagctgcagtttgctgccctgtacctctcatccactggtgctggttctccatgcttgccttctgttcctgccagggcaaaatgtagtacccaacccatagcattccagctgccattgaaaatggtcccagatgagaagggtccctgaagcagaagtttagagcatttgttatttgtcctaaaagtccaacaaacatctagtttataggtttcccaatttatatatttgaatgtaactctttgtggccatgaaagtttataaaaccataatgataactagaggaaatacttggaggaacatcttgctaagcatttgtaatatcttgcaaaacacgctcttaatgtcactgtcagaaatacacacaggtgtccttcagcttacagttatgcacttgatgagcacaaagccacaggcaggaatggctggtccctctcaggaagggaagagtggggctacctggggaactgaaggacaagagaccaagtcctggcatcgtgctgccttgatttggggcaactttagcagttatttgatgctaactaactgctaaatgatatgaggctgtgagttcaagtctcctcaagtgtaacgttttagctgagcctggaatatgtccgagaatgtgctggcctcttacgggggctaggaattgggagttgtggcaactccacttcctaatcttcagaagagcaagactgatgctgcagcatcaaagcagttaatagtgacttccacctgccacaatcttggagaaaagagatgggcagtgcctactattaacaggtctgacctgtaaaagctggaggagaagtaactttatcctatctcctgcctccattactgcttcttacatcttcatgtgctcatcctcagggatgggaagggacacagggtcccaaaggtctgaatatgattctctcctccccagcccagttaactcccttagctacgttctcttctccctggtccccactgtcctcacccttctaccccatcctctgtcagggcagaaactgttctgaattggttacactttgagggaatgagatagaatattcaaagacgccctcttataaaatgaagtcggactgtgggaggctgcatctcccataccactctgagcaggggagtttatgcaacagaaacgctgtgatgtagaaacccacatggcttatatgcttttgatttattttactggtaggagcttttgattatgttaggagctaaatcagcttttgaaggtcagcactaggatgcagaacatatatctatgaaagaaagcatttcaagttccaccaaacagctttgcattcagcttggggatcagaaactattcctgaaagactgtcttagggtgttgggaattaagataatcagttcttagggttttatctgtcatttgtgagtatatttataaaaatatcccccactatcagctacttaaatagcctgggaatgggtttggggtgataacacacttgtgaaacgatttttagtctctttcctacacgagcaagaggaaaaagttctcctctttgatcatgactgacccattgcataaactgtattttttttaaataaaggtagtggtttccaacaggttgccctgttttcatgtaaattggccttttaccatgagaattccatcgttgccttatgtttttgtaaattcaaatatatgtgtgtggatatagatatagatattgttttccctccctcagttaatattaggccaagggctgctccagagttgccagatagaaggggcttagccacagaaatctggctaaaaggtgttgagggagtaggagctttgctttgaagctgtgtttttatttcaatttcctgtttatggcttgggggggccagatggagactatgaaggggctttagctcccccaaaccacctctaagcattgacactatcagcaaactgcttttgcttctggcaaagattcccaaagagccggagaaaatcctagtgtgaacataatcagaaagccagcctccctgacttccattgttggagctaccatgacaccatattcagatgaactatacacaaaatggaaattggaagcattgtcacctcttaataagaaaatttatattgaccactgatggattttattttgtcaatagattattgggaataattgctagtatctttcacttacatagcactttaagctttatgaaatgctgtactatcttgatttaagttatttcttgaagggcttatctgaaaattcaagctcatggctactgtttggttcatacattctgctgttcagaatccttggcatgtgcctccaggggaggttgctttttcctccaagtccttttattctacttggcccacactaaaattgtggtcagaagtggcctataccaatctcccacctgaagcaggaatcatttccacatgtcctaacagggggctctagaagcaaaggtttatggttgccttcagaaatgtttctgtttctctaacggagtgcacatgatctgatagaaatacagtgtgaaccacaaatgcaagccacaaacggaattttaaatgttctagtagtcatataacaaaaagtaaaaagaaacagagaaaattaattgaattacatattttatttaacccaatatatctaaaatattatcaattcaaaatattagttatgtaaaataattattaataagctattccaagtaagtttcttccttgtatcccagaaaatagtagcaatctactctatctcttcccactccttcctcaggataacaagctgctttctttgtccctcaaaagtggaccaaaccactggcaacaaggaggacagctgtacccagtgggacaccagtctattccacagcactccagtagtggacagaggagggaaatgggggaattcagaaacctagaactactaatgtcaggcattgtcccaaggtttgggcaggttggaattactgcttcctccaaagatgccagtctagggcttccaaaattttggaagtaaaactgtagttttttttaaaggcccagtcccttcaagtgaagtccaattcaacctcatatgtcattattatcgaccacaaaatcagacttttgaatgctaacttttgcattaacccattatcttcacagcaccgtaggaaatagtatgatgatttctatcgtacagacgaggcaaatgactcaccctgtgtcccacagctaatgggtggtggaactgggactcaaagctaggcaatttaagcactgagccaattaacctaaccacaacactatccaagagaaagtactcatttcaggggtaacagatgagaagattaatctaagatttcataaaagagctgtgagaatgttataaatatctggaccactttgcctcttaattccaactagttagctttaaaaataaaatggcaaagacctttttcttcatgtcagctcaagggagctgagccagggccaactatgtggttccctttcttttctccacagacctatgaaataaaaggctgagactcagattctaggagattggctaatgtaaatgctggtctaaattaagaaataatcagattatccctcacataaaatctttcatcagaacaaataaaacatctcttaagtgaccaaaaaccatgtggtgtttgggaaatgacattattttggctgcccagtatgaaattctgcatggaaccaacaacatattccaaactgtttattcactaaagggatattgtataaattaataaattcctccttatgttaatcagctttgccatcgttttacagagataaatagaaactttcttcctgaaatggaacagaacacaggaaatatatgagacctctattcttgcctcagatactgtttgtgtcttcatatccaactcatatcaagcccctttctcgccacttttctaattgtggatagcttctggccattttaaactgttttccacatgccatgaggataaagtgcttatgtatttttattcagttctaaaatttcaagagtaaaccattgactcatactaaaaagttctccatctttagaaattctttagggttataacttctaggtaaatctgattagtggaaatctgatcttggcaatacaaaacaaactccagtaaacagtactagagtttccttttcattcctggtactcattatgtaaaatataacatgaatgggggttgaaaagctgatatgacattggtagattatatacatgccaaatataacaattctggtaggaatgaaaaagaactccagacatctctacgtataaccacaatgaactttgcctggtgatagtttaagttaatgtccataaacaactggaaggccctttatcatttaagcatcattaaccatgtgtttggggatcgatgagacagttttaatacacatgatgttttaagagaaagttcctctatatgagtgttttcacttgacgtcttttctcctttgccatttgatattatgaatgctgatttgaataaagacacaattacactggttttaaaaatgtaaacagaaagaaccttagttcttttcccaaaagagaatttgtgcattatgtccacacctttggtcaagtgggtcctcactgctatctcagatggtttagaccaggtcctcagcttaaagagaaacaccttctggagatggtatatttcttctttggcatatcaaaaaccaatcacagtattaagtttaaaaaaagaatagaaatggtgagaccgtgtttcaggaaggcaatgaacaggtctctttccagctagaggcttaagacccagttcatctgcaactcagtctgctcagttggcttctcctgtcctgttttgaaatttctgaccctctactccctgtccttatcttgagctcaagtccattgtacctcagtttatattatcaaggtgtaccaagctccatttttctgagaatattttgctgcctaaaactgcccctaacagaaaactaaacctaagaaccttgcagctgggacatacatgtgatggaaagggccagggatcggataagcacatttagaaaggctgaaagttcctctagagcagggtccataacctgtgctgcatggaaagtgcctggattttctgcctgaattcatttgcaaaaacgtttatatgagtttatgtttatatgtttgtatgagttgtgggtagatggttcatagtgtccatcagtttgtcaaagagttaagagccaccatcttggaataaataggcccagaggtctaaaccttagcatttgctctttttttgtttccagttctgagaagcacaagacaaaggacactagtcctggagccacatggatccagtttttcctattgcaggaaaataggcttctgtttccctctaccacaaagcacctgtgattcaggcaaagggatttctttaaagcatcatatacctgaaaaataatctccccccaaaatgttttttttttaaagaatgaattaggcaaagtctatagtcaggacaccttagtgtctttgagaaggcaggtaaacatataacaatctatgcttgcaatttagctgtggaaaagtgtggaggaaaaacaagtcccagagaaagctaagtagctacttagaaatagccatggtttttcagtccataaacaggaaccatgatatccataaacttttgaagagaaatctttgaagagaaatctcctccaaacccataatgtggtcagacatttgtgaatttcatgctaagctttacattacaggctttttatatagatggcagcagagtgtctagtggctaaaagccaagtttggtgtcccatggattcagtttgactccacattttctctacttacccagactgtaattctatgcaaagtaactgatcttctaaaccttcatttccttctaacataggaataataatacttcgtaggtttatgtaaatattaaacacaatatgccttataaattgcttggcaccatgcctaacacacagtaggtgtttaataaatgttagctgctatctctaggggattccatttcaagggaaaatcagattgtatattaatggtcaggaaatgaattctgaaagctcaaagtcatttgtttgattgacctaagtgggccttttgtttttaagtgtgataaatgaataattttaaactattccaggttttagataaggttctaaagggatgtctcacaccctggctgcatattaaaattacttggagcactttacaaaccttgatgcccatggctcagcctagactaattaagttggagtctctgggtatcgggggaactcacccccaatatttcaacttaggttctttctattttccataagtgttggccggctgagaaagagaaagagtacgaagagaggaattatacagctgggccgctgggggtgacatcacatatctgtaggaccatgatgcccacctgagctgcaaaatcagcacgtttttattaaggatttcaaaaggggagggggtgtaagcagggagtaggtcacaaagatcacatgcttcaaagaggaaaaaggagaacaaagatcacatgcttctgaggaaacaggacaagggcaaaatcagaaactcctgataagagtccaacagagatcacaaggcaaagggcaaaagcaaagatcacaaggcaaagggcaaaagcagaattactgataagggtctatgttcagtggtgcacgtattgtcttgataaacatcttaaacaacagaaaacagggttcgagagcagagaaccagtctgacctcaaattaaccagggtgggtttttttccccaccctagtaagcctgagggtactgcaggagaccagggcgtatttcagtccttatctcaaccgcataagacagacactcccagagcggccgtttatagacctccccccaggaatgcattccttctccagggtattaattattaatattctttgctaggaaaagaatttaacaatatcttccctacatgcatgtcagtttataggctctctgcaagaagaaaaatatggctctattttgcccgaccccacagccagtcagaccttgtggttttcttcccttgttccctgaaaatcgctgttattctgttctttttcaaggtgcactgatttcatattgttcaaacacatatgttttacaatcaatttgtacagttaacacaaatatcatagtggtcctgaggtgacgtacatcctcagcttatgaagataacaggattaagagattaaagtaagacaggcgtaagaaattatatgagtattatttgggaacggataaatgtccatgaaatcttcacaatttatattcctctgccgcggctccagccagtccttccatttggggtccctgacttcctgcaacatctggggaagggagaaatgcctcagaatatttttatgcatgtatgtatgtatgtatgtgtgtatgtatgtatgtatttattttgagacagagactcactctgtcaacccaggctgaaatgcagtggtgtgatctcagcttactacaacctctgcctcctaggttcaagcaatccttcccctcagccttccaagtagctgggattacaggtgcccaccaacacgcctgggtaatttttgtattttttagtagagatgtagtttcaccatgttggccaggctggtctcaaacttctcacctcaggtgacctgcctgcctcggcctcccaaagtgctaggattacaggcgtgagccaccgcacccaacctatttttaaagctcctcaggtgatttcaatgatcggccaaataaagccctcatttgctctaaaattctgaacccactttgtaattgcattaaagatagaaaagtagcgcaaaagaatagtacctggtcagtgccaaaatgaagttttctatgggaggctgcttctatacatgacaatgctaaaatagcactaattctcatctgtgccactttgtaaatgtcacaacaaggctttaccttcttaacaaagccctgtagagacagcctgccctgaggaattaaaattcacttgactcattgggattagcacttggtatttttctcataacaaatacattggtagtgcacacaaaaagatggataacttctaccaacctctgaaactgaattgccgaatatcactgacatattattaattaattatcttatatcctttgtgacatcctttaactaaaaactcaggactggccggagggagaggagaatgggcagttattgtttaatgggtacagagtttcaatttgggatgatgaaaataattctggagatggtagtgatggttgctgttctttgttcttttacgtggatgcagtcaagtgcatccacaagaagagacacaggagatgttcaggaaaacacagacatggtggaccactcagggccacatgaaaaagcatcggtttcagtcaggaggcagagaggcaggagggtggggaggacctgggccaagcctttattggagtttccacaagaaaggcagagcagggtaaacagtttaggattggttaggttgaataatttcagcaggcgctaagctataggggtggtccctagttgcctggtacctggcattggaatgataaaagcagaggaataaatatttccttgatagaagagttctggccctggataggttagtctgtatatcaaagacatgctcccagcctaactctttgctatctctacaaattagctagccccggaggggcattctctcccagccaagaagaatttaagatgtcaaaacataatatgcagaaaagtgaaaatataaacaatatgattgccccacaatgtaaatgtatttaatgtatagctgaaaatggcaaaatggtaaattttatgttatatttattttaccacaattttttaaaatcccagtatccataagatcaaaaatatagtaatctaggcaaaagacaagaaccaaaagaaaaaaatggggaggtagaagacaaaacttacatcaagaatttcgagggtcactgaagtatgtctcttctccaagtataaaagaaggaactggctgggcgcagtggctcacacctgtaatcccagcacttcgggaggccaaggcaggcagatcacttgaggtcaggagttcaagaccagcctgtccaacatggtgaaaccccatctctactaaaaatacaaaaattagccaggcgtggtggcgggtgcctgtaatcccagctactcaggaggctgcagcaggagaatcacttgaacgcaggaggcagaggttgcagtgagtggagatcacgccactgcactctatcctgggcgacagagtgagactccatctcaaaaaaaaagccgtcttctacaaaatattggtcacctccaaagtgcaaattttaagcaattctcaaaattacccagcatagtagatgaaaaggaaaggaaacagtacagaattgcttcatcctctacaccaattttcacttctcattattctgtcacgctctaaagacattcaggaactctgatgtgggttattctcccctgaaaacctgactcatcttaatgtgtgaagctgcaacaccagaggctatgccttttctgcacttcttggctggccaattcagtgtgaatatgttctctggttaaactagatcatcaactcagctgcaggccctttctacaggagtgctcagttatgcatcatgtgcacacgtgtgtgtgcatatgtaatcactaatatgtgttttaatctgtagacctatgtgcatcattatcctgaatttcttacctccaaatcactcttttaacacaccagcctgtgtagttttcatccaaaatagtttaactgacaagaaagctattgctccattgcacctcctcacctagctttcctctactctctgggaaacccaccatcaattcttctttttccttactcatctgccaaatcttttctccattccctatgccaagattctccggcgtaaacacctatggctgccaaaccttcctgctcttgtcccaacataagcaaactgaagatgactaccctttgcgctctctgcaatttgctttgtatatccagttgccagatgcctgcagagtaagtactcagagaagggaaacaagctgctccttcttctgcagaaggcgagtgaagaaaagaggggctaggtgtctaaagccattggtaagaaagaccctggagccttataaagcactggttttaaatgactaggtgtgatctacctttgttttcctcttttctgtgaattttgtagaagtgtgatctttatcaagatgcattattccattccttccaacctgcccaaacatttatgttgctccctaaataactaagaaatcgtttgagggctggtagagcagtttggtccatatgtaaagatgtgtcagctttccagtgttcaggacattgttctgaggcctttgctctaatacaggcctgcacgtagcacacagtgagcactgcactggcatcaggagagttggaatttgcatcctgatttggccactaaccagctctgggtacttgagcaaattatctaattttctataccccagtgtctgcatttgtaaaatggatataataacaatgaacactgtggagcacttaggatgtgagcactgatctaagtagcttacacatatcacttcctatcatcctttcagcaactctatgaagtgggtatgttattattatcacccattttaaagatgtcaaaactgaggcacaaaggtccattattaatatcttgccattggtctcaaactatatacagaggtaggattcaaacccagtccaatggccagaactcatactcccactcagggtgttccattgcagaacctgtctcgctgaattgtgatcattagatttagtatttggaagtaaatgtaacatgttattagttttcctgaagttcacttccttatctgttaaaaagagacaatctctaagtttcagagtttctataaggagtagagataaagcggggttagtacccagaacaattcatgacacatatattaggttattgatacactggagctactaatattatcattattatttatattgttaaaagattctattctagatgacaagaaaagtttatttctctccactcccaatgacaccaagacattgtgcatggtgttaatgttaattgcattccacagaaaacatgctttcattgagttcaaggggaaaaaatacattcattatgttacagtttacataaggaagaaaggtaagattcccaacccccacctttcgttccccaccactaccacagacaaaacatggttttgcttttaaatctcaagacataacatagggtctaagcctgtctactgctacgatgtaaaactaacatcatttttcccctttgcttcttacagatttttgcatatatgaatgaaacctcttcccgaaaggaaaaatgggacctccaagctcttaggtttttatcaattaattcaataattgacccttgggtctttgccatccttaggcctcctgttctgagactaatgcgttcagtcctctgttgtcggatttcattaagaacacaagatgcaacacaaacttcctgttctacacagtcagatgccagtaaacaggctgacctttgaggtcagtagtttaaaagttcttagttatatagcatctggaagatcattttgaaattgttccctggagaaatgaaaacagtgtgtaaacaaaatgaagctgccctaataaaaaggagtatacaaacatttaagctgtggtcaaggctacagatgtgctgacaaggcacttcatgtaaagtgtcagaaggagctacaaaacctaccctcaatgagcatggtacttggcctttggaggaacaatcggctgcattgaagatccagctgcctattgatttaagctttcctgttgaatgacaaagtatgtggttttgtaatttgtttgaaaccccaaacagtgactgtactttctattttaatcttgctactaccgttatacacatatagtgtacagccagaccagattaaacttcatatgtaatctctaggaagtcaatatgtggaagcaaccaagcctgctgtcttgtgatcacttagcgaaccctttatttgaacaatgaagttgaaaatcataggcaccttttactgtgatgtttgtgtatgtgggagtactctcatcactacagtattactcttacaagagtggactcagtgggttaacatcagttttgtttactcatcctccaggaactgcaggtcaagttgtcaggttatttattttataatgtccatatgctaatagtgatcaagaagactttaggaatggttctctcaacaagaaataatagaaatgtctcaaggcagttaattctcattaatactctttatttatcctatttctgggggaggatgtacgtggccatgtatgaagccaaatattaggcttaaaaactgaaaaatctggttcattcttcagatatactggaacccttttaaagttgatattggggccatgagtaaaatagattttataagatgactgtgttgtaccaaaattcatctgtctatattttatttagggaacatggtttgactcatcttatatgggaaaccatgtagcagtgagtcatatcttaatatatttctaaatgtttggcatgtaaatgtaaactcagcatcaaaatatttcagtgaatttgcactgtttaatcatagttactgtgtaaactcatctgaaatgttacaaaaataaactataaaacaaaaatttgaaaatggagtagtattttatgaactccctcaaataacattttgtgattaatataaacatagtatcttttaaatgagttcaaagtggaaaaattatatttaatttggcagattcgtaaagtgtggttgccaggttttaaagtgaggttgcaaattagagtttaaaatattcattataatacttggtattagaagatatttttttcctccagtttttacccttccagtatgatctttaaaatagtagaaccatcttatttttttcatagtgatattattggatagccactccttaaaaaaaaaaaaaagagatgcttgttttctccaaagtctcattgagttgtttatccaaagctatttcctttaagcagttatcaaactagctgatcacttagaatgatttcaaaccaatctaggcatcagtgtattttgatacaaacaatctacgtcaaatcagctcttaagaagaataaataagtggtttgcttttctacaaatttaaacaagccaggcaaaatttaacttaactaaaatctagacatgtaaataaatcttcc

SEQ ID NO: 5 - DNA, 1248 bp, Homo sapiens
tcagtacaccggcaacacgcgcgcctctgcccagtgccgcgcccagcgggtgctcagactccttctctccctccccgccggcgcaccccagggactcggaacgcccccgcgagtgtgacgcgtcctgcctcccctgcagctcgcggacactcgcacttgcaaggcctggccagcactcttgggcccgccccccgacagtgcgggggcggagacgacggctcccctaggctctggctcccggccttggccggcgcgggtaggcgcgggagcctcgagcgccgctcggatgcagcagccgagccgccactcggcgcgcggcgggagacccagggcaagccgccgtcggcgcgctgggtgcgggaagggggctctggatttcggtccctcccctttttcctctgagtctcggaacgctccggctctcagaccctcttcctcccaggtaaaggccgggagaggagggcgcatctcttttccaggcaccccaccatgggcaatgcctccaatgactcccagtctgaggactgcgagacgcgacagtggcttcccccaggcgaaagcccagccatcagctccgtcatgttctcggccggggtgctggggaacctcatagcactggcgctgctggcgcgccgctggcggggggacgtggggtgcagcgccggccgcaggagctccctctccttgttccacgtgctggtgaccgagctggtgttcaccgacctgctcgggacctgcctcatcagcccagtggtactggcttcgtacgcgcggaaccagaccctggtggcactggcgcccgagagccgcgcgtgcacctacttcgctttcgccatgaccttcttcagcctggccacgatgctcatgctcttcgccatggccctggagcgctacctctcgatcgggcacccctacttctaccagcgccgcgtctcgcgctccgggggcctggccgtgctgcctgtcatctatgcagtctccctgctcttctgctcgctgccgctgctggactatgggcagtacgtccagtactgccccgggacctggtgcttcatccggcacgggcggaccgcttacctgcagctgtacgccaccctgctgctgcttctcattgtctcggtgctcgcctgcaacttcagtgtcattctcaacctcatccgcatgcaccgccgaagccggagaagccgctgcggaccttccctgtaaaagctggaggagaagtaactttatcctatctcctgcctccat

SEQ ID NO: 6 - protein, 232 aa, Homo sapiens
MGNNDSQSEDCETRQWLPPGESPAISSVMFSAGVLGNLIALLARRWRGDVGCSAGRRSSLSLFHVLVTELVFTDLLGTCLISPVVLASYARNQTLVAPESRACTYFAFAMTFFSLATMLMLFAMALERYLSIGHPYFYQRRVSRSGGLAVLPVIYAVSLLFCSLPLLDYGQYVQYCPGTWCFIRHGRTAYLQLYATLLLLLIVSVLACNFSVILNLIRMHRRSRRSRCGPSL

SEQ ID NO: 7 - DNA, 3237 bp, Homo sapiens
agtgccgcgcccagcgggtgctcagactccttctctccctccccgccggcgcaccccagggactcggaacgcccccgcgagtgtgacgcgtcctgcctcccctgcagctcgcggacactcgcacttgcaaggcctggccagcactcttgggcccgccccccgacagtgcgggggcggagacgacggctcccctaggctctggctcccggccttggccggcgcgggtaggcgcgggagcctcgagcgccgctcggatgcagcagccgagccgccactcggcgcgcggcgggagacccagggcaagccgccgtcggcgcgctgggtgcgggaagggggctctggatttcggtccctcccctttttcctctgagtctcggaacgctccggctctcagaccctcttcctcccaggtaaaggccgggagaggagggcgcatctcttttccaggcaccccaccatgggcaatgcctccaatgactcccagtctgaggactgcgagacgcgacagtggcttcccccaggcgaaagcccagccatcagctccgtcatgttctcggccggggtgctggggaacctcatagcactggcgctgctggcgcgccgctggcggggggacgtggggtgcagcgccggccgcaggagctccctctccttgttccacgtgctggtgaccgagctggtgttcaccgacctgctcgggacctgcctcatcagcccagtggtactggcttcgtacgcgcggaaccagaccctggtggcactggcgcccgagagccgcgcgtgcacctacttcgctttcgccatgaccttcttcagcctggccacgatgctcatgctcttcgccatggccctggagcgctacctctcgatcgggcacccctacttctaccagcgccgcgtctcgcgctccgggggcctggccgtgctgcctgtcatctatgcagtctccctgctcttctgctcgctgccgctgctggactatgggcagtacgtccagtactgccccgggacctggtgcttcatccggcacgggcggaccgcttacctgcagctgtacgccaccctgctgctgcttctcattgtctcggtgctcgcctgcaacttcagtgtcattctcaacctcatccgcatgcaccgccgaagccggagaagccgctgcggaccttccctgggcagtggccggggcggccccggggcccgcaggagaggggaaagggtgtccatggcggaggagacggaccacctcattctcctggctatcatgaccatcaccttcgccgtctgctccttgcctttcacgatttttgcatatatgaatgaaacctcttcccgaaaggaaaaatgggacctccaagctcttaggtttttatcaattaattcaataattgacccttgggtctttgccatccttaggcctcctgttctgagactaatgcgttcagtcctctgttgtcggatttcattaagaacacaagatgcaacacaaacttcctgttctacacagtcagatgccagtaaacaggctgacctttgaggtcagtagtttaaaagttcttagttatatagcatctggaagatcattttgaaattgttccctggagaaatgaaaacagtgtgtaaacaaaatgaagctgccctaataaaaaggagtatacaaacatttaagctgtggtcaaggctacagatgtgctgacaaggcacttcatgtaaagtgtcagaaggagctacaaaacctaccctcaatgagcatggtacttggcctttggaggaacaatcggctgcattgaagatccagctgcctattgatttaagctttcctgttgaatgacaaagtatgtggttttgtaatttgtttgaaaccccaaacagtgactgtactttctattttaatcttgctactaccgttatacacatatagtgtacagccagaccagattaaacttcatatgtaatctctaggaagtcaatatgtggaagcaaccaagcctgctgtcttgtgatcacttagcgaaccctttatttgaacaatgaagttgaaaatcataggcaccttttactgtgatgtttgtgtatgtgggagtactctcatcactacagtattactcttacaagagtggactcagtgggttaacatcagttttgtttactcatcctccaggaactgcaggtcaagttgtcaggttatttattttataatgtccatatgctaatagtgatcaagaagactttaggaatggttctctcaacaagaaataatagaaatgtctcaaggcagttaattctcattaatactctttatttatcctatttctgggggaggatgtacgtggccatgtatgaagccaaatattaggcttaaaaactgaaaaatctggttcattcttcagatatactggaacccttttaaagttgatattggggccatgagtaaaatagattttataagatgactgtgttgtaccaaaattcatctgtctatattttatttagggaacatggtttgactcatcttatatgggaaaccatgtagcagtgagtcatatcttaatatatttctaaatgtttggcatgtaaatgtaaactcagcatcaaaatatttcagtgaatttgcactgtttaatcatagttactgtgtaaactcatctgaaatgttacaaaaataaactataaaacaaaaatttgaaaatggagtagtattttatgaactccctcaaataacattttgtgattaatataaacatagtatcttttaaatgagttcaaagtggaaaaattatatttaatttggcagattcgtaaagtgtggttgccaggttttaaagtgaggttgcaaattagagtttaaaatattcattataatacttggtattagaagatatttttttcctccagtttttacccttccagtatgatctttaaaatagtagaaccatcttatttttttcatagtgatattattggatagccactccttaaaaaaaaaaaaaagagatgcttgttttctccaaagtctcattgagttgtttatccaaagctatttcctttaagcagttatcaaactagctgatcacttagaatgatttcaaaccaatctaggcatcagtgtattttgatacaaacaatctacgtcaaatcagctcttaagaagaataaataagtggtttgcttttctacaaatttaaacaagccaggcaaaatttaacttaactaaaatctagacatgtaaataaatcttcc

SEQ ID NO: 8 - protein, 352 aa, Homo sapiens
MGNNDSQSEDCETRQWLPPGESPAISSVMFSAGVLGNLIALLARRWRGDVGCSAGRRSSLSLFHVLVTELVFTDLLGTCLISPVVLASYARNQTLVAPESRACTYFAFAMTFFSLATMLMLFAMALERYLSIGHPYFYQRRVSRSGGLAVLPVIYAVSLLFCSLPLLDYGQYVQYCPGTWCFIRHGRTAYLQLYATLLLLLIVSVLACNFSVILNLIRMHRRSRRSRCGPSLGSGRGGPGARRRGERVSMAEETDHLILLAIMTITFAVCSLPFTIFAYMNETSSRKEKWDLQALRFLSINSIIDPWVFAILRPPVLRLMRSVLCCRISLRTQDATQTSCSTQSDASKQADL

SEQ ID NO: 9 - DNA, 1779 bp, Homo sapiens
agtgccgcgcccagcgggtgctcagactccttctctccctccccgccggcgcaccccagggactcggaacgcccccgcgagtgtgacgcgtcctgcctcccctgcagctcgcggacactcgcacttgcaaggcctggccagcactcttgggcccgccccccgacagtgcgggggcggagacgacggctcccctaggctctggctcccggccttggccggcgcgggtaggcgcgggagcctcgagcgccgctcggatgcagcagccgagccgccactcggcgcgcggcgggagacccagggcaagccgccgtcggcgcgctgggtgcgggaagggggctctggatttcggtccctcccctttttcctctgagtctcggaacgctccggctctcagaccctcttcctcccaggtaaaggccgggagaggagggcgcatctcttttccaggcaccccaccatgggcaatgcctccaatgactcccagtctgaggactgcgagacgcgacagtggcttcccccaggcgaaagcccagccatcagctccgtcatgttctcggccggggtgctggggaacctcatagcactggcgctgctggcgcgccgctggcggggggacgtggggtgcagcgccggccgcaggagctccctctccttgttccacgtgctggtgaccgagctggtgttcaccgacctgctcgggacctgcctcatcagcccagtggtactggcttcgtacgcgcggaaccagaccctggtggcactggcgcccgagagccgcgcgtgcacctacttcgctttcgccatgaccttcttcagcctggccacgatgctcatgctcttcgccatggccctggagcgctacctctcgatcgggcacccctacttctaccagcgccgcgtctcgcgctccgggggcctggccgtgctgcctgtcatctatgcagtctccctgctcttctgctcgctgccgctgctggactatgggcagtacgtccagtactgccccgggacctggtgcttcatccggcacgggcggaccgcttacctgcagctgtacgccaccctgctgctgcttctcattgtctcggtgctcgcctgcaacttcagtgtcattctcaacctcatccgcatgcaccgccgaagccggagaagccgctgcggaccttccctgggcagtggccggggcggccccggggcccgcaggagaggggaaagggtgtccatggcggaggagacggaccacctcattctcctggctatcatgaccatcaccttcgccgtctgctccttgcctttcacgatttttgcatatatgaatgaaacctcttcccgaaaggaaaaatgggacctccaagctcttaggtttttatcaattaattcaataattgacccttgggtctttgccatccttaggcctcctgttctgagactaatgcgttcagtcctctgttgtcggatttcattaagaacacaagatgcaacacaaacttcctgttctacacagtcagatgccagtaaacaggctgacctttgaggtcagtagtttaaaagttcttagttatatagcatctggaagatcattttgaaattgttccctggagaaatgaaaacagtgtgtaaacaaaatgaagctgccctaataaaaaggagtatacaaacatttaagctgtggtcaaggctacagatgtgctgacaaggcacttcatgtaaagtgtcagaaggagtgcattgaagatccagctgcctattgatttaagctttcctgttgaatgacaaagt

SEQ ID NO: 10 - protein, 352 aa, Homo sapiens; identical to SEQ ID NO: 8

SEQ ID NO: 11 - DNA, 1796 bp, Mus musculus
atggacactgctgtggaagccaacctgggcgctgctggccacggtccccgtacagagctcagtgatgaggactactaccctcagggcagctgggacacagtctttctggtggccttgctgctcctgggactgccagccaatgggctgatggcatggctcgctggttcacaggcccggcacggagctggcacaagattggccttgctcctgctcagcttggccctctctgacttcttattcctggcagcagcaactttccaaatcctggaaatccagcatggagggcattggccactgggcactgctgcctgccgcttctactacttcctgtggggtgtgtcctattcctctggcctcttcctattgacagcgctcagcctggaccgctgcttgctggcactgtgccctcgatggtaccctgggcaccgtccagcccgcctgcccctctgggtgtgcgctggggtctgggtgctggccacactcttcagtgtgccctggttggtcttccctgaggctgctgtctggtggtatgacctggtcatctgcctggacttctgggacaccgaggagctgcctctgcggatgcttgagatcttggggggcttcctgcccttcctcttgctgctggtctgccatgtgctcacccaagccactgcttgtaggacctgttgtggacatcagcctaggcgcatggcctgccacggctttgcccgtgtggccaagaccattttgtcagcctatgtggtcctgaggctaccttaccagctggcacagctgctctatctggctttcttatgggatgtctaccccgggtacctgctctgggaagccctggtctattctgactacctgatcctgcttaacagctgcctgagccccttcctgtgcctggcagccagcgctgacctccgggccctgctgcgaactgtgctctcctcctttgcggctgctgtctgcgaggaacgacctggaagcttcatacctgccgagccacagactctgccgggaccaacatctgaaggccagtcaaggttggattctgtggtccagcctcaggtgaatccttctgtccagctacagtcagattctgtggtccagcctgaggtgagcccctcagcccagccacagtcagattctgtggcccagcctacggtgggctccctgatccagccaccgttggatactgtagttcaacttgaggtgaaccctctgacccagccacagttggatcccatggctcaacctcaagtgaacccctcagcccaaccacaatcaaagtctgtggtccagcctcaagtggaccccctgacccagccacagttggatcctgtagcccagccacagtcaaacacagagaccccaatccctgccttcggggacgagtcagcctctaaccctggtgaggaaaactcctctggcccatgcccagatcccactcctgggacccctgagaacctagacagaccagctgttccccaggaaaaaagccctagcaatgtccccccagaagaagcccccagtgcaggacctacttgagtagcaggaagcacaggcctgccagggcagtggaagagtcagagagccgatgaagcatctgggcagaggtgggaacaggaaggaacccagcagtgagagagagcccctgagtccctcgagcctgccgggaagactgaggggaagagaaaccagtcaaccaaaagtcccaggcagggcgctgtgaatgtcttcatcctggtcgcaccaggcttttccatgactagcccaagcacatagagccacccagcatccttgagtcc

SEQ ID NO: 12 - DNA, 1796 bp, Mus musculus; identical to SEQ ID NO: 11

SEQ ID NO: 13 - protein, 505 aa, Mus musculus
MDTAVEANLGAAGHGPRTELSDEDYYPQGSWDTVFLVLLLGLPANGLMAWLAGSQARHGAGTRLALLLLSLALSDFLFLAAATFQIIQHGGHWPLGTAACRFYYFLWGVSYSSGLFLLTALSLDRCLLALCPRWYPGHRPARLPLWVCAGVWVLATLFSVPWLVFPEAAVWWYDLVICLDFWDTEELPLRMLEILGGFLPFLLLLVCHVLTQATACRTCCGHQPRRMACHGFARVAKTILSAYVVLRLPYQLAQLLYLAFLWDVYPGYLLWEALVYSDYLILLNSCLSPFLCLAASADLRALLRTVLSSFAAAVCEERPGSFIPAEPQTLPGPTSEGQSRLDSVVQPQVNPSVQLQSDSVVQPEVSPSAQPQSDSVAQPTVGSLIQPPLDTVVQLEVNPLTQPQLDPMAQPQVNPSAQPQSKSVVQPQVDPLTQPQLDPVAQPQSNTETPIPAFGDESNPGEENSSGPCPDPTPGTPENLDRPAVPQEKSPSNVPPEEAPSAGPT

SEQ ID NO: 14 - DNA, 97419 bp, Mus musculus
  misc_feature (1)...(97419): n = A,T,C or G
gccgcgcggagccgagcgggcaaggtgaatccagccctggggccggctgccggagcgcttggcgggggcgccggctccatgggcagcggcgctcggcacgatgatggacgttaacagcagcggccgccccgacctctacggccatctccgctctctcatcctgccggaggtggggcgcaggctgcaggacctgagccccgacggtggcgcccactcggtggtgagctcctggatgccgcacctgctgagcggcttcccagaggtgacagctagcccggcgcccacctgggacgcgcccccggacaatgtctccggctgcggggagcagatcaactatggcagagtcgagaaagttgtgatcggctccatcctgacgctcatcacgctgctgacgatcgcgggcaactgcctggtggtgatctcggtgtgctttgtcaagaagctccgccagccctccaactacctgattgtgtccctggcgctggctgacctctcggtggccgtggcggtcatgcctttcgttagtgtcacggacctcatcgggggcaagtggatcttcggccacttcttctgcaacgtcttcatcgccatggacgtcatgtgctgcacggcctcgatcatgaccctgtgcgtgatcagcatcgacaggtaagggacaggccgccccgtcccaggctctgctggagatgtgcagggcgctgagctcgtgccagccttttctgggaggatcgatccagctagacttcacggcaggaataagggctgagcttaaaaatacaaccccgcacccatcacccctacaccaaccaagcaacttcaagcacaggctaaagacaaacaaacctttaaaagaaacgttgaaatgtttccggtttagtgtagtgatggttctaagaccagagttttaaaagtactagcaattccaccaggggggtccctttgtttgtttctttttggggggaagtgtgtgtgagaaattggtctgatgctcctagcttgacaaaccattgctgtgatccatacggtcatttctctctttaagtcatcagtcagaaagacacggtgcttcccagattttaggagctactctgaggatgaagaaaggcccttgaatggtcctagtattgggctcttaaatgccgcactcttatgaaatgctaattctgaatcttgatcttgtggaagtctgacttcagtgtttggccatgctgtcggtctcctgaaagcttactggagccttactcctgtcttaaaaggttggttctagtctttcgtcatatcccctgggaatctagggatataatatcgagaactcccccagtggagtaattgaagcagaggttgaccatctgtcagggatgctggggaaagagaaaaagaaatgccgctttgagtgtcatcacagagtaggagaatcccgggagtttcttcagactctaagaatacagaattttgatggagctggtttttggccttaaacacatgcaaatgacaacttgaagtatggtttcaatactccttggctacagaacaattctgtttcctttgggattgaaatattaagccttaatatccatacttggaattctgctggtgatttcaacccagcacaggactataccctgttgtgcttaatgatagagagaaatagtggctggttttcttagtggacccgcagagcctttaaatctgtagctctttcagcatggggagaataattgatacctctgcatttacgatgacagtgcctaagaggatggattggcgtgtaactgagatttcctcccacttttcctccttgaaaacattgcaatgtgtggtttgttatgttaaaaatgatcttctagtttgctttatgaccgaagtttataattactaaataaagggtacggtagtaaagggaatgtttgtcaaggggaaaaaaaccacattgtagttgtatttaggtagtggcttattattattattttttaaaaatgatactgccagtttaggtgtcatgacagtggcttctgacagcaaacaaggaattattttaagagtggaacatgaactgcctctgtgagaatattggcaccaggcttggcagctgaagttctgaattactgtagttaaaaatgacaaaaaaacatatgcatttacagtctggaaatgacaacgggaatgtggagagtgcacctaatacacataataagtgtatccatgaatgacatgcatagacctcgcctgctcagcaaccgaaaacagttctcccatgaatggagtccttgtaaatggacctacgtgtactaaaacagatatcagcttaggctgcaagtgatgtctttataaccctttcttcatctcataatgcgaaaatgataaatagcaccttgcgctaacttgtcagcttgtgcttctgttgctgagggcacatccatgttaggctgagcccaccctgtggttcctatacttgggctaatggcatctgtgtgcacatgcaatttagtaccagcaggaatgtcctgagtacagagcaatggttaatccttcttggcaagattctcagctttttattaattatatccctgggactgttacaaattacggcaatatagtcatatcttatatattttgtttcctgaagaattgacctgttggtgattttttttcctaaataatttttttaggtctgcatattgttcctttagataaaatgaaaaattgatacaattgacagaaatattgatttttctcccaagaacctccaaagctagaagctggaagaagatgcatttataactaaagtgaattatttcaggaaaaaggtaatttcttcagcactgctgtagaacttgccagatgacacaaaatgtaccatcaaaacaatttatccttctttctttccccgagtagctaaaataggtgacattgtgctttgtactggacaaccaaggatgagtaagattattcttttcagctcacactacaccattgtatgagtttggatatctgttggacatttgacctgtctaaattgaaccctgaaaactttcttcaccatgtcctaccatgttgggttctttctcaactctgtctaataaaaaccatattgttttctaaaggcctcaaagttcccatcctgaaccccctttggagaatgattcctgtccactgttagattacaaaactctccttccatctcatcccgctcaaaggcttggatttttactcatgcttctacttcggtctgtctttggcttttcttctctattaggtcaacttcagtcttccatctttaagaacacctcatttttggacttatttgtttttctagtttttataccactaaatggttaagttcaaagaactgtgcccacaactgtattttcctctctaccattcaccttatgagttctatattaccagggacactgtaacattcaaactcatctttttagttttcttttgcccactccaattcatttccaataaaggatctagaatggttaattattattattataattgttataataataataattattattattagtatagtaaacatagatttattaaagaaaaggaacacaggaaagataaagttttgtcaccctataaagctcttttgtacctttcctagacagtttccacaatgaagtccgatagccaagggtggcctcaaatgtgctgtgtagaccctgagtagccttggatcaccctgcttctgtctcctaagtacttgggttttagatgtgtgctaccatgcctagcttcaagttacctaatatatagagtttaaaatatgtaaaataagcttgatttgttgttttttgagcatatacaagatttagaagtattaaaaaaatgtagctgggatatagtggcacatgcctttaatcccagaattcagggggcagaagcagaaagatcgctaagagtttggggctagtctggtctacagagtgagttccaagacagtcagggctatacaatgaaaccctgtcttggaaaaaaaaaagatacagaaatataaaacagttcagaggctcgatggacatccattcaggagagaggtttatcttgggtgggttccatcaggaatcagcatcaggaatcaattttattaagttttttttttttttttttttttttttttagtgtttccaaggtagatgcaatcttatttgtacagctcttcatacatttgaaatggatttaaaaaggtatacatttcaaatatagaccagcacacatcctaagtgcagagcttggtaactagcagcatatcgttacagtcaacagtataaacaagtgcaacagtgtcaacctcacagaggtcctccctcttccccctctcttcacaatacacattgaaacctctgttaggtgctcaggagagaatgaataaagagtaaattgtcattttgtttcctaaggaagccaataacctgacttttagcttcataattttgccctactaaaactttttagaaaggtagaactgaaattatacagtctatgctcttttctgtgggtcttttgtttgtgacaaggtgtgattctgtcgctctgaatggcaaagtcctcctgactccctcctcctagtgcagggatggtaggcatgtgtcaccgtggccagctcaagcacccacacccggaatccttcttaagctcatcataatgcccataagattcaactatactactaataatttatacatggtactatgtataaagctactctgaaggttgattgctcatcaagtcactttgcaaaccttgtattagttactttttggttgctgtggtaaacttacatgcccaaggcaacgcatagaaggaagggtttatttgggtttattgttctggagggataagagtccatcattgtcatgacaaggaagcatggtagcaggcaggcatagtggctagagcagcaagctgaggtctcgcatcctgaaccagacaggaagctgagaaagcaaacctggaatgatcagggttttaaattctctgaggccacctccagcgacacatttccttcaacaaagccatacccttaaatctccccaaacagttctgccacctggggaccaaaaattcaactgtccaagaccacagggaacatctcattcaaagagatgcaaagcagacatattgaggggttgattattttaattcaattaaggaatgagctatgaagtactgttcttattactgtgacaaaatacttgataagaagcaacttaaagtagaataggtttattttggcttgtagtttaagtgtgtggcccatcactgcagggaggcatgcagcaggacgtaaagtgaccgtttccacgttttcacagtaaggaagtagagaaagatggataatggtcatattactttctctttgtaattcagtcctggaggctagtcatgatatagtgttgcctacattgatggtgggtcttcttttttcagttaaacctttctgagaacattcatacagacacacccagaggtgatgctacattcaatcaagttgacaatggagataaccattgaatacccctttgtaattcaacatccaaaaatatcacttaaatggtaacattctactcctggctcctaaggtctaattttcattttaatgcaaaataatttaatccatctctaaaagtctttatagacttcatagttccaacaatgttttgaggtccaaaggctattctgaaattcaaaggcatgtcttaactaggattgcctataaacaaaaacaatagccacaaataatgtgaatgctttcagtatacaaaggcagagaataaacatgtatatgctgaaagggaggaatgggaggatagtaaagaccagaaccagagcaaggatcagcccaaaacaagactaaaactctgtggttgtttgagggcaaacaccacacccatatctgccatttgggattcaggtggaatcacctgggctccaatgatcttatgtagttttgctcctccagttatggtgtggatagcatggacagactttttctttagtctggggagaggaggtcagctccactctgtgattttggctttacttggtagatatcccatgtttctggcatctctgaaatactggagtctatttcaacttaagcttcactttcccagcttaatgaaattgtctcctaggctttcttgggtgcagggcagggggatccaacttggctacacattgcctcctggcctcctttgctttctagaaccatagtgaaggcccttgggaccctgttcattccctcatgtatctttcattcctgaaaaatcaatactatgtgtaagacagtgcctcttgaggtgtagcctgggtcccttggaccataactactgcagcccctgcatgcctttcaggctgactctgggaaagcacttccatagaaggccattttgggacagaaaatcctttgtccgttcagtctctgaccttttatatgtatctgaattattacaatgcattgctcaatggatggggcttactctcagagcacctttccattatcctacctctgagggagagttttccctttatggcgctaaccacttcagcaattatgatttattgctcagcagccccctcttttcacaactttcacctgccccctgctcctttcctcaccaagttgcacacacttttttcatatctgtttcatttgctctctctctctctctctctctctctcgctttctctctctctctctcttcctcactgtagacctggataagagcagtaactcatagccacgtctccatctgctgggttagccgtcttgaaatttcgcatgcaaaaaaattagttgattattttaaaatgtgtcctcattcacagtcttagggcacaggcagaacgccatcagattctttgcaagtatataatacgagcgacctttagcctagatcctgatagaatccatatcatactctgaaacctcgtgaactgagatgttcaccgacagccacagtctcttgtcattttggccttccagactcttactggagtggctcacagagctcgatggacagcctgctaggacttctgtagctccaagctccagactcttccattctctccctgcagattagtttctaaagacctaggaactaggtcaaatttatcatggcaacagttacactgctgctaccaacttcctttattagttatgtttcttgttgtggtggcccaaaacctgaagtttagcaatttaaaagagaattgctttatttcgagacaaagcctctcatgaaatccagatcccaccaactggttaggccggccagcaagtcccagggatgcactcctctcttcttccttaccactaggattatagacacctgccaccacacctggctttcctttacccaggttctagggatctgaactaagttccttggatttatttcacaagcactttcctaactgagccatctcccactctctgagattcggtttagtttgaggggctataattctctgtagtgtgagcctcatgctggaagtatcaggatacaccgcgaccttctgttcactcagagaagagggatggacgctggtactcagcttattgtccttgctttttgtggttttgtttttgattttgtttttaaaataaactccagcctgttagcccatgatacgatgctgactacatacatgcaggggatctttccttttcagttaaaattttctggaaatacctgcttgacacaatcagaaaacatttccatggtgatttgaaatccaatctaattgatagtgaaggcaaaccatcgcaagctgtccctgtaagtcgtgctggcagatgccccttttctaggatgtagctttcttaggagttcagctcagagatttggatgctctcagtgacttctccctatgacttacttatattttagtctctagagaactgtgagcctgtcaaaactcccactgaaaacttttagtatcggagctctcgggcttcttagcctcctgatcttctcagttccagaatccagcaaatgtcttgagtggaatgccagattagtgcttgccttgcctgctggtcctcccttctcactgggatcttggcctctcaagtctccaatttttgtctttctggtcccagacaattgccaaaagctcttctgatgtttttgactcttaagagcatctccacatgtaagctcttcttggatcctcagccttttaggcctgacccagttttggctaatgacccaaggggatttaagcctaccttcctgtcttctgagtgtttttagtcctgaagtcctagtgtttgaagagctctgtgatatctacaagaaggtatgtgtgtgtgtgtgtgtgtgtgtgtgtgttttgtgttgtatcaagcctttttatagttgctttaagtggaaacattggtctaaaacatctgaaaatctcattattgctccaagtgagcgtgtgcctgaaatagcttaaatatacaaatatagaaacaacataatgtaaatgtcttgtttaaaacccattgttggctttcatgctgcttggaatggaattaaaacccttctatcacagtacaaggaccttttttttttttgtccctgtctcacttctccacaacttgtggactatcttgctctctacattctggccatattgatctattgtttgcttgtttgtttgtttgtgttgtttttcccatgataccaaatgctttcctctatcagccctactcaaagaaaaaccattaaataatatccagtcatattctgtataacaacatttttaaaaatgttttttaaccttttaaaattttacgtgaatggctgtctatctacatgtgtgtctgtacaccatttgtttgttagatcacgtgggactggaactatttatagacatttgtgagctgccatgagggtgcttggaattaaacccaggtcttttgaaaagcaaccaatgcccttgagccatctctccagcctctcataacaacatttcaatcaatgatgaactacatatacaattttagtctcataaggttatgtcacctagtgatgttatgctattttaatttgggcatatactgtgtttccaataatggtaaaattgactgtcaatgtgctgttcagactgtatctccagtctgctactaagcaatgcttgcttagactgtatttccattctctgctgctaagcaatgcttgcttagactgtatttccattctctgctgctaagcaaagcttgcttggactgtatatctagtctctaccgctaagcagtgcttgcctgtatttgtgaaaccaatttcacactgaagtttcattccacacaccctcatggcagctcacaaatgtctataaatagttccagtcccacgtgatctaacaaacaaatggtgtacagacacacatgtagatagacagccattcacgtaaaattttaaaaggttaaaaaacatttttaaaaatgttgttatacagaatatgactggatattatttaatggtttttctttgagtagggctgatagaggaaagcatttggtatcacgggaaaaacaacacaaacaaacaaacaaacaagcaaacaatagatcaatatgaccagaatgtagagagcaagacagtccacaagatgtggagaagtgagacaggaacaagtgctttttttttttccagacagggtttctctgtatagccctggctgtcctggaactcactctgtagaccaggctggcctcgagctcagaaatccgcctgcctctgcctctcgagtgctgggattaaaggcgtgtgccaccacacccggctacttatttgcttttgagataggatcttgtaacacagtttagtatgcttttgaactggtgatctacatgcctcaaccttccaagcgctgagactacaggcttatactaccatgttgcataacagttaactttgaccttaagttagaaagctgaaaaataagaaatgttcaactctcaaaataatcaataattaaaatatctagaaaaaaactactaaatgttggcaaaaaggagaagtaagagaactttcattggttagtagtgtgactgtaaagcgatgaaccactgaacgtgtttcactcttgccacaagttactgagggcgcacgtacactaatctttgttgcttcactgcaaatgtatataagagagactcttgtctactaaaagcattctataaaaatacttatagtactcaccaacttaaaactcctgagcttgagatgattaatgcacatatatgtctatggtagaatgagtaaataaattgtgatatatatatatatatgtgtgtgtgtgtgtgtgtgtgtgtgtgagatatgtatatatatgttatataaattggggtacatatacacatatatgatatggtatatatgtgaatacattgacaataaatcagaactactcagagagtttactaagtaatacatagtgctgattaaatcaaattttagatgccatatcattttaacaatgaatattgtagggtcatatacataatgctgaccagaaggaacaaagtacaaaagaataaagatatgtgaccccatgcaaatgaaataagaactacacaacctggtgtagaggtgtgtattatcagtaacataaataaggagggaatgcagctaaggagaagaaggagaatcatttctaggtgggaaagagattgtgacgcaagtgacacgcttcttgggtagtgcagcactctctttcttgacaggagttgtaatgagagtttagaatgattgtcaaagcatccacgtatactttaggcatttcctagcacaagcatatcatttattttgtagcaaaagaaacagaagtgtttattgatgacaacttgtgaagtgcattttttggctctctttcagctatatggttagtttgagccggtgcagttattgtttaagtaccatcagcagtcccttgtgtctagctccatattggggggcaggggtcatctttgggttgttcacagttacaggaagtcatctggtgcttttccaagagccacaatgcttaggtctgactggtgtctggctgaagtcttgcctccttgccaggtgctatgagtcattgccttcgatgatctgagttctgctgttggcgttggttctgctgtgatcagcagtgcaggggcatcctggcctctcaggatcgcctttctcttcgaaggaagtcattcttgctcagctcctatattagtttgcagcttgtacagatattttaagaattgtcggaatcttctagctttgctaaggaaagacgagagaagagaaacagacagctttcattttttttctcccgttaaccgacaggattgctttttatttttcataggccacttccacataccaaatctcctctcatctctctgcctctttatgaagtgattgttctccctgtgtgctgttagaggaaccaaaggctcttcagaacacaggcgacttctctaaggatatacagtttatagtgatggaactatgctcaaactaattcaagcaatgcgtatttacatgcttatgttatatatatgtttatatattttataatatttatatatagcataacatgtcattatgtataacattttattgtgtattgttatatattacatagcacatgaatgatatataacatgtgctacatatgttaaaagtgttatatgtatgtgtgttatatatatagacatataaatatatgataacaggaaaatacatttataaatataatagaaattgagatatgggttaatggtggggataaatcttattttatgttgcaatcaaagtgtagaattagattagtggtggaaatactagaaagagtcctaggcaaagcactcatgatggaggctctaacttagcatatgagtgagcccagagaggagagcaaggaggccttctaagtgaagggatagtaaggaagatgcccaagtcagtaagagtttgccccttattgccgattctgcagttgttttttccccagtctccttcctctttagttactgaaatacgtccttacccaggctatagcttcgcagaataaagactacttcttagcttctcttgcagccaggtgtggccatgttactctatttggtccaagagttgctaatagagctatcaatgttttggctttctgataacatcccttaagacaattagcacaagctccctcacctttgtcttctctccgttattgttgcctagaataggagcctggagaggtctggtcactttggtgaagggccatactttagaaggaagaggagtatgaagaacaggtatcttggcacacagtgtaaggaatgctggagcccttaacttcttaccattaccactatgctgtctattatgattcaactcaatctgaactattccatctaactaccagtttcttccccaaacttgattgttcttcctacaaatgtttccacatttcctcaaacctcagtgtagatgtattgttctcctttgtaaatatttcagatataagataccagtttataagcgtttcttgttactgaggtttataggcacagaagagtaaccagtgatatctcatttgagtcttcttggcatccttgtaaactgtcttcactaagtatctgacatcgaatgtctcttctgatcaaaagtgagcatgacatgtatgactgcatctaagactattctgtaggtaaggatgctgaggaaagtcacgtacattgcatatgggagaaactgtcagattccaaagctcattggtttctttacatcatcatagccattgcctactatgtggttgttaagcatttctggaatccccagacttaaataccctcagatcactctgcattttttccttctagcagtacttcaatgtaattaaaacattgagaaatcgactgttagaagtcatgattcatgggctcatctgtaccatctataatggcaggagctggactagtctggctagaaattgtatttttagttctcagcagaatatttgggttataataagtgttcagctatctttgtagattgactgagggaaaaggggaaaggtggggagggacagaggggggagggagggaaggaaggaaggaaggaaggaaggaaggaaggaagggtctctcagattccagatacatctgggcctaacttcttattctccaacatctacagaacattcctcttggtgaatgtggagtttacttgggaagccaaattaggatgaaagagattgtgtcggggggaacagaagcaaggtgtaggcagcaataacaccagggaacagcctccccaaggcgctgtaagctggtgagtcattgatggctctctacacctgtggaacagacattaacaagttgccattactatgaacgccttagcagctgaaagccagggatggcttgctgtagatcagacaaaattaaatggaaattccaaaccttgtcctttcagtgaatcaacagatttttaattaactcatgaacctcgtaaagaagagtcataggtattagggatgaaggcaatgcctgagtagagcagctgagtgtagaaataccatttattgagtgtgtgctgtatagcaagcccactaacaggagacttacacggtttgttttatttaacccctttaatgattctgatttttttttttttattctgaactcaaacctctctaaggtgaagaagagaagtacattatttagcgatagagggtaaatgttttttcccctaggaatattcagaaagaaagatgcaattgcaaggggtgcatgtgtatgtatatgtatgtatatgtgtatgtgtatgtgtatgtgtatgtatatgtgctctgacacttggtcttttgaaccttctgcatatcctttggtattggcattgtgaacacaatctgttaaccctgtcaaccacagagcattttctcttcctttacagacaagatgatgaagatattaataaccataattatagtgttagcataattccttaatgttatgtctgaaactctttgggctggctggctgtatttctgggttctgaatttttttttggagtttagaaatgcaattcagtgaatgtagatcacatagctgctgggacaattaattatgaattgtcttgattatattaagacatactcatgtaaatgctaaaacaatccccccccctgggcggggggagaaaaactaaagtctaaaaaaatagttaatagtaataataaaaataaaaaaaatagtaatattagcccacctcatatttttctgccacagagacttactggaaactcagtaggaaagaaatcccttttccaagtacatctgtatccgaatccctggaacctgtacacctgtgactatgcatcataaaagggtcaggggaggtgagggagcagtggaatcaaggtttccagccagttgacttgacagttgggaaattctgggttgcctgaccgcacccagtacaatcataagggtctttaaatgtggaagagatgggtgagggagttagagaaggaggcaagacgatggtgtggctcttgtagtggtattccctgggaagacgatgcaagataccactgctggctttgaagatggaagggaccatatgccaagggatgtgagtagcttgcagaagtcagaaaagagaaggaggaaatgggttcttcttgagtcttgaaaagactgcagccttctaatgccagctcagtgttagctaaggaaggtgcccatcacacacagggcccaaataactactgaataatacactcacactgctgttacatgctaagtttgtggcaataaagaattgaatactgtcaggttaagagaaagatctgcattcagaccgttttgggtgtcaggtttatagatgagagtcctgggaattgaaattagttttatcccacagtaggtgctgctgctctgacttaatcctctcaggagccccatgtaagggggcttttgttagttccttccctttttattccactaatttatttattcactttgtatcgcaatttcagccttcccttctccctctgtgcccacctcacacagctcctcccccatcccttctcctctgagaaggaggagaccgcctccccccctcgccccgccataccaacccattctggcacatcaagtcactgcacataatctctcactgaggcctgacaagtcagtctagttagaggaacaggatccacaggcaggcaatagagtcagggtaggacccttgctctggttgttgggggatatgcatgaagactgagcagcacatctgttacatatgtgcagggcaagggcctaggtccagcctgtgtatactctttggttggtggttcagtctctgggaggttgacttggttggtcttcttgttgaatagctcaggaggttagtgaatattcctaaggtttcacaactaatgtagggaaacttgggatttgaagccactggtgttttgggtcaaggagtgggtaccaatgctcaggactatctgggctcttgtgtatgctagtctgaactatactccttggccttcctgtaagatacaagacacttacctataaaattgataatgaaagcttcatttttcaggtttttataaactgggggcatgtggaaaatcctttaccaaaggccttgttcatactgagtgttgatatgttaaccattgctattgttagtattattgtgttaaagtatgcatttctatttaacagggagtccattgctgggcaccgaagaattggatctctaaggaaatattgaacagtcctagtaagtcgaaacttgtaggataaaaattcataagataacttgtgactttgtcatcaagactcctttttctggttggcttacacggagtgttagaggctcagtatacttggatgcatctcaaagtttctgcatatagttgaacttagcatctggaaacagcagtgaggctagtttattccaacaagctgagaatcctccctcttgtttatattggcaagcttttggggtagggttaagatgggatcactgtaggatactagacccagtcctttctagggtcaaggaacaatgtcagtgatgaactctaatagggagtgtgtgtgagtgtgtgtgtaagagagagagagagagagagagagagagagagagagagagacagtgagactaagagacagagagagagatacagagacagacccacaaaaacagagacagagacacagagagcaaggaaggagagatagagtttgagtgagtaagctagaggattatttaataagcaaatctcctctttgcttactaggtatttaagtattgaagatgtaaatgtgaataggaacacagagtcagtgtccagcattatctagccaagagtatcaggatcattttattcacatattagaaatgttggagcttgaaaaacattcaattggagacattgtattaccactaattttcctttgtggaatgatctttcctgaaggggttatgagtcatttagttgcaaatatttgaaatgtttttgttctatcagtaaggaacagatattccatgatctgttttcaaacaggctttctgtgcctaaagaattcttaagaactcctataaaatgataccctgtaggtcagacataagacaagagttaactcttctgatgtgtgttgaagttaaggatgccagtcttgggatgggaagctgtgggcctttggggacatctatagttcttctatttggatgactctctaattgcctatttatccatttacactttaattttcatatggcctctgttctgactcaaatcccagagtgttctgtattgctgaaaactgatactttttactctttagcaggcagctggatggatagctttcttccttctgaatgtttctttcatctggaacatcaggcaaaaccatgcactctatcaggacactatcaatattttggcagaaacacgagtagacttacagggcatgccctaatctagcagtggtcagtttggttcatctgcttccatactgcagaattttattttgagaaatgcaagtgtatgtttggatttaaaatgcctctgctgtactctgtaaaagccctgaaaattctttcttgctcatgagtggattgattatggttttactattgatagttttctaggtactacaggtttctatgatgatactggcttagttctaaattccattggcaaaagcccttaaaaatatctatgaaaacattaagacatcccttcattattaaaggactcgtaggggattcatctacttacttctttacatgtattggttccctaatctgtattgtttactctgctgaaaccaaagcaagacaaatatactgtattctggcatcttatgttttaacaaaacaaaatgggcaagaaagtgtgtacagacagagagatgaatatgttaggacaaagtgggacacagaaaattaaaatagagaggcatgttggagtgggtgatggtggaaggtctttctgaggatgtaaactggaaaggaaagggtggtgaggatggctcagctggtaatgactctttctctcaagcctgatgacatgacttcagtctcttggccccacatagtgaaaggagaaaactgacttccacaagttgtcctttcactttccacatgtggcaccctccaacacacacacacacacacacacacacacacacaccaaaacaaaaccatatctagatgtaaaggacaagaaggatccatgcatgtgggaagaacattccagtcaaagaaagcgactgttacgaagaccctggaccagtgtgattagaaaggagggcccaaagtaaccctggaaggagatgaaagcatcatagtgatcatatattatattagggaatgagggcagataaagagtttgcattttattttaaagttatttgaaaggacttccaggtctgtgttcattcagagatgatgcacctaaccctcaagagactggaggtcccagggagtttagaggtcaggtagggtaggggggtggggacattcacgtggagatggggtggggtggggaggaggaaggtgtgggatgtggtgcagatggagggtggatggagtggcacggaatggaatatggagtgtaaaaaaataaattaaaaataaaataaaaaaatattttaaatgtggtagagccattgttagcagccagattcctatcctaatagttcattttggttcctttatcagtaatgacatggaagaacaagactgagaactgggagatctactgaaaggcttttttccccccaatggttcaggcaagagatagctgtagtctgaaatgggtttgggtagtaaaaatggagacaagtagaggtatcccaggtgtactttgagatgctctggtacatcttgctgatagactgtgcatgagagctcatcacatttgtgcttttggctcaaggaattcaagagacaatgatgctgataactgtgatgtgagagtattagcttcagtggtcaatggaaagaattgtattttgaatgatcgatcaattggttatcagcaaacatttagacatatgatcctagaattccagaaagaagtcaaggctagagatacaaggctagagacttgaatgttgtgctggctagttttgaatgatcccatgagattcacctgtgggcaagcctgttgttcattgtcttgattgatgatagatgtgggaaggttatgctatataagggctggatggactgggtgctataagaaggtacattgagcaagccatgggaagcaatccagcaagcagcaccccctctatggcctctacactagttcctttctccagttcctgccttgagttcctgtcctgacttctccgagtgaaagcctacaagataaatgaggaaataaacccttacctcctcaggttgcctttggaatataaagtggtttgaagccaagagaagagaaggagccaacaaagtttaggaagggatggtccatgggatatgagaaatgcctgggttgtactgtggaatttaaagggaggatgttctggcaaagatggaatgtaactagtgtgctgatgtggaagtcactggtgatcttgacaagggtagtttcagggaagtggtgggagggaggtcgaggagaggaagatgactgcgaatggatgaaagaagcagaaaacaatcagtataacatttgcaaaaagtttaaccaccagtcactcattgaggcacccagattccaaccctatatctgctgcaaattgttgatgcacgtcttgcatttcattaggataggcaagaactccaacttcattattcacttctataccccaaatctcacaagttctgggcacacagtaggtcttggtcattttagttggatgaatggatgtatgaccttaggaaaattctcttagaatagaaataacttaggcatgagaccatgtctcatatcttaagtctcacatacaccaactaagattcaaatgtattcctgaatgaataaacgaatctgatggatctggttgtagagttgggaaggtaggaaaactcagagatgggagatgtttagaccaaggttcctggagcaatgggtatgacccaagtcacaggccaaagagctctgttgagacagaaagtagagggtaacagattcaatgcaatcccaatcaaaattcccaacttaattcttcactgagttagaaagggcaatttgcaaattcatctggaataataaaaaacctagaatagcaaaaactattctcaacaataaaagaacctctggtggaatcaccatgcctgacctcaagctgaactacagagcaattgtgatgaaaactgcatggtactggtccagcaacagacagatagatcaatggaatagaattgaagacccagaaatgaatccacatacctatggtcacttgatctttgacaagggagctaaaaccatccagtggaaaaaagacagcattttcaacaaatggtgctggcaggactggtggttatcttgtagaagaatgcaaattgatccattcttatctccttgtacaaagctcaagtctaagtggatcaaagaactctacataaaaccagagacactgaaatttatagaggagaaagtggggaaaaacctcaaagatatgggcacaggggaaaaattcctgaacagatcagcaatggcttgtgctgtaagatcaaaaattgacaaatgggacctcataaaattgcaaagcttctgtaaggcaaaagacacagtcaataagacaaaaaggccaccaacagattgggaaaggatttttaccaatcctaaatctgataggggactaatatccaatatatacaaagaactcaagaaggtggactccagaaattcaaataaccccattaaaaatggggttcagagctaaactaagaattctcaactgaggaataccgaatggctaaaaaacacctgaaaaaatattcaacatccttaatcatcaaggaaatgcaaatcaaaacaaccttgagattccacctcacaccagtcagaatggctaagatcaaatattcaggtgacagcacatgctggcgaggatgtagagaaagaggaacactcctctactgctggtgggattgtaagcttgtacaaccactctggaaatcagtctggtggttcctcagaaaattggacatagtactaccagaagatccagcaatacttctcctgggcatatacccagaaggtgttccaactggtaataaggacacatgctccactatgttcatagcagccttatttataatagccagaagctggaaagaacccagatgtccctcaatagagggatggatacagaaaatgtggtacatttacacaatggagtactactcagctattaaaaacaatgaatttatgaaattcttgggcaaatcgatgtatctggaggatatcatcctgagtgaggtaacccaatcacaaaagaagtcacttgatacgtactcactgataagtggatattagcccagaaatgtagaatatccaagatacaatttgcaaaacacatgaaactcaagaaggaagaccaaggtgtggatacttcattcctccttagactagggaacaaaatacccatggaaggagttacagagacaaattttagagctaagactaaaggatggaccatccagagattgccacacccggggatccatcccataatcagccaccaaacccagacactattgcatatgccagcaagattttcctgaaaagaccctgatatagctgtctcttgtgaggctatgccagtgtctggcaaatacagaagtggatgctcagagtcatctattggatggagcacagggcccccaattgaggatctagaggaagtacccaaggagctgaaggggtctgcaaccctataggtggaacaacaatatgaaataaccagtaccccaagagctggtgtctctagctgcatatgtagcagaagatggcctagttggccatcattgggaagagaggccacttggtcttgcaaactttatatgccccagtacaggggattgccagggccaagaagtgggagtgggtgggtaggggagcagggtggggggcataaagggaactttcgggatagcatttgaaatgtaaataaagaaaatataataataataataataataataataataaaagaaagtggatggtaggttacagtctcttctaaacttgactgattcttcaactgtaactctacacaccatcccttaagttttaacctcactcttcatagttatagatacagagattatatcaacaggggagttagccaaggatctgactcttaaaatccacccactgatggtcatcattgcactaaggactcaggttctccagtcagtcagggctttggggattacagagctgctgaatgggaggactcagtgaccccttgttgagtctccttttattataaaagggatatgcaaatcagattaatctttatgaaaagtctacaagtgtagtggttgttgggctgtgttcctcccacgttctcctgtggccagtacaggaacgtttattttctaccatcatcaaacaagactgttgctttaatttttgtgtgcccccacctctttgtcaagtggtaagacccttggtggcatatttttcatgtttgttttcacctagcctatattggcatttgaaggtatttgatacatgttttctggatgtgtgaatgattaaataagtaaactaatcaagtttgcacgtcatgactatttaatagaatcttgagtatggaacatatagccaggcgtaaatgaagagatgtggaagccacagtcatcaatggtgaaccagtttggacttgggcctgtttccttcccttcaccacagctgtcagcagcatttgtctatgactttgaaagcacagttatgtttcatatgatttatgaagacactgctgattttattcccaggatgttctgtcagtaaggtcttcctgtaagggcagtcagtgtaacggggttttacctgcatagctcattataagaacatccccagaagccttattgggttagcttctaagcctcagagacacagcttgacagtggaaacagtataccaggagcctctctagcatagatctttccaatatacctgcacaacatgggaaatcaaacagtgaactccttttatcttcagaaccttcccaaacacattgctcacttggctgaactacagacaatttttatatgtgtgcactagctcctttttgattcttctctcagggaacagctctgacaacagctcctactctgacaaatttcttggagactggtatattgtccgcaggtgtctcacttgcacacaggcttgtaacatactgtgaaaatggtcctgaggtctttccaccctggtatgtacagctctttaaaagcatgactttgtggccttcacatgtgagctctaggcttggccttataaactgctttggcttatagaactttgacaaacacgatgtgacttggaaacaatgcccatttctccagttgctgccttggggaccctgtgatgctagttaccttggtaaaaagcctgagtgggataagagacccatagctgctttccttgtctttctgttgcccattgcatgtatgaggttatcataaattattcagatgtcagaagatctaccacctgaccacagaatcagtggaggtgaatcagacctgcccgggccgaaacagggagcagaataaatagctggtgctgaagccacaaactttagaatggttagttaccctgcggggagctaaccaatgaatttactctcctgtctccagaatttattttcccatattgatttgcacatattatggtacaatacctatcctactgtccagatgggtaagtttataagtctgtttttctaggagacctttcatactccagtgacaggggcagtgccttcaggagtgaaaaacttgctctatgtaatcccaagtccactgccaggcacaaccatccactctgaaaacgtgactaagtgtatgcagataaaaactggataaatatatgcacatcaataagtgtcttttaatctcagcttctttgtcaccattagcaccttacttatgtatttcttccccacttcccattcagttacacaaaacttggcattgggtatactatattatcattggtttgtattttcatattctttttttttttgtagttatggtgccttttgtccttccttataactttttagtggacccacagatcaaagccaaagtctttccaagtttaaaaaaaaatgggattatatagctataaaagacatcagccgaaataaagccttttgataaaagccaacgtttcccttttctaacttacatttctcacatgctgttatgggatgattgatgttttatttagatattttcttttcaatgcaaaaggcttgcacttgcaaaatgaacagttttcccttggaaagctattaattccatctgtctaaggtggtaactcttcaaacaaattcatttaatgtgttgcttcagtacaaattgcagataggtttgtggcacttttggaagtccctcaagtgaaaaaggcttccaaagtcagaatgaagcaaggcagctcaggtcaaagccattaacaagcttccaagaattacttgttaaataaatgcctaatgtgagattaataataaacattagcactgattagtcaaaccctgtgctgcaccatgaacattttatttaatctacataacagctctacatggtaggttctaatgttcctgttttacagatgagtaaaggcttagagagcttaatcagggtacacaggataacttgggccatgtaaccaaacattattgtgtcttatttcagacctgattatcttaatctttgagtttcactgagaaagggatgggaattatctactcatgatgaatcatatatccttaaatcaaatcactgatctaaccatgggatttacctaggggcatgaagtccttggttggcagaagcatcgtgttaatttctttttttttaacttttcccaatttttattaggtattttcttcatttacatttcaaatgatatcctgtaagtcccctatatcctacccccaccttgctcccctacccacccactcccacttcttgaccctggtgttcccctgtactggggcacataaagtttgcaagaccaaggggtctctcttcccaatgatggccaactaggccatcttctgctacatatgcagctagggacacgagctctgggggtactggttggttcgtattgctgttccacctatagggttgcagattaatttctttctgagtcatcttgatgtttagatgcaggagctgacctagttgcatgtgtgggtctatgttcttcccaggtgccttcacgttttggctttgcatctatttaggactcatggtcccacaaagtatcaaacatcagagaatgtaaaatgggaaagggtctatctaccctaattcatatcttcacttccagtctccacatttatccaggcttttctcttctggaaaacggacccatagtttgtggctggatgctacagcagagggcgaaggaaggacctgtcagagggcgaagagaggctgtgccactgtaggggcagcttgttctttctgtgcttcttcttaaacatgttttcattttgtatttcttatttgccctaacttttacgagttctttgagaatgttgaccaattcactttcatcatattctccattcctccattcttcccaaattctttccactttccttacacacccaattttgtattccctatcttttcatgtggttttgtttttaaaacttattaagtacaaattatactgatcatatagtcttggatgtgcagccttcactggaggctggtctacgcactaggcttttcagccttaaagaaaactaaacctccttcccccagcagctgtctgttgtcaatagctccttagttaggacttcatgctcacattttgtcctctgtgctggaatttcatttgtcctgaggctatgtgtactgtcacaactgctcatatgtgcaactgccctgctgtgcctggaaaacactgtttcattgtgggtctaatgttttacctcttctaccatgattcctgaaccgcaggtaaagaggatacagtacaaatggaacacttagcactgaacattcttcttctttttttttaattaggtattttcttcatttacatttctaatgctatcccaaaagtgctcccaccccatgcccaccccccactcccctcactactcccacttcttggccctggcgttcccctgtagtgaggcatataaaatttgcaagaccaatgggcctctctttccaatgatggccgactaggccatcttctgatacatatgcagctagaaacatgagctctgggggtgtgtgtggtactggttagttcatattgttgttccacctatagggttacagacccctttaactcctttagtactttctctagcttctccattgggggccctgtaatccatccaaaagctgactgtgagcatccacttctgtgtttgctaggccccagcatagcctcacaagagacagctatatctgggtgctttcagcaaaatcttgctagtgtatgcaatggtgtcagcgtttgaaagctgattatgggatggatccctggatatggcaatcactagatggtctatcctttcatctcagctccaaactttgtctctgtaactccttccatgggtgttttgttcccatttctaagaaggggcaaagtgtccacactttggtcttcgttcttcttgagtttcatgcgtttagcaaattgtatcttatatcttgggtatcctaagtttctgggctaatatccacttatcggtgagtacatattgtgtgagttcctttgtgattgggttacctcactcaggatgatgccctccaggtccatctatttgcctaggaatttcataaattcattgtttttaatagctgagtagtactccattgtgtaaatgtaccacattttctgtatccattcctctgttgagggacatctgggttctttccagcttctggctattataagtaaagctgctgtgaacatagtggagcatgtgcccttcttaccggttagaacatcttctagttatatgcccaggagaggtattgctggatcctccggtagtactatgtccaattttctgaggaacctccaaactgatttccagagtggttgtacaagcttgcaatcccaccaacaatggaggagtgttcctctttctccacatcctcaccagcatctgctgtcacctgaatttttgatcttagccattctgactggtgtgaggtggaatctcagggttgctttgatttgcatttctctgatgattaaggatgctgaacgttttttcaggtgcttctcagccattcggtgttcctcagatgagaattctttgtttagctctgagccccattttttaatggggttatttgattttctggggtccagcttcttgagctctttgtatatattggatattactcccctatctgatttaggatagacaaagatcttttcccaatctgttggtggtctttttgtcttattgacggtgtcttttgcctcacagaagctttacaattttatgaggtcccatttgtctattctcgatcttacagcacaagccattgctgttctgttcaggaattttccccctctataagtttctctgtctataagtttctcctctataagtttcactgtccctggttttatgtggagttccttaacccacttagatttgaccttagtacaaggagataggaatggatcaattcgcattcatctatatgataaccaccggcttgttcccgtaccatatattgaaaatgctgtcttttttccactggatggttttagctcccttgtaaaagatcaagtgaccataggtgtgtgggttcatttctgggtcttcaattctattccattggtctacttgtctgtcgctataccagtaccgtgcagtttttatcataattgctgtgcagtacagctttaggtcggacatggtgattcccccagaggttcttttatcattgagaagagtttttgctatcctaggttttttgttattctggatgaatttgcagatttccctttctaattcgttgaagaattgagttggaattttgatggggattgcattgaatctgtagattgcttttggcaagatagccatttttactatattgatcctgccaatccatgagcatgggagatctttccatcttctgagatcttctttaatttctttctccagagacttcaagttcttatcctacagatctttcacttccttagagtcacgccaaggtattttatattatttgtgactattgtgaagggtgttgtttccctaatttcgttctcagcctgtttatcctttgtgtacagaaaggccattgacttgtttgagttaattttatatccagctacttcactgaagctgtttatcaggtttaggagttctctggtggaatttttagggttacttatatatactatcatatcatctgcaaaaagtgatattttgacttcttcctttccaatttgtatccccttgatctccttttgttgtccagttgctctggctaggacttcaagttctaggtatctccatctatggtaattgaaagtttggctgggtacagtagcctgggctggcatctgtgttctcttagtgtctgtataacatctgtccatgatcttctggctttcatagtctctggtgaaaagtctggtgtaattttgataggcctgccttcatatgttacttgacccttttcccttactgcttttaatattctatctttatttagtgcatttgttgttcgattattatggtatttcttttctggtccagtccatttggagttctgtgggcttcttgtatggtcatgggcatctcttcctttaggtttgggaagttttcttctataattttgtttaagatatttgctggccctttaagttgaaaatcttcattctcatctactcctattatccgtaggtttggtcttctcattgtgtcctggatttcctcgatgttttgagttaggatctttttgcattttacattttctttgattgttgtgccgatgttctctatggaatcttctgcgcctgagattctctcttccatctcttgtattctgttgctgatgctcacatctatgtttccagatttctttccttggatttctatctccagcgttgcctcgctttgggttttctttattgtgtctacttcccttattaggtctagtattgttttgtgcatttccatcacctgtttgaatgtgttttcctgcttttttttaaggacttctacttgttttgttgtgttttcctgtttttctttaaggacttgtaactctttagcagtgttctcctgtatttctttaagttagttattaacatccttcttgatgtcctctaccatcatcatgaaatatgcttttaaatctgggtctagctttttgggtctgttggggtgcccaggactgggcgagcagtgctgggttatgatgatggtgagtggtcttggtttctgttagtaagattcttacatttgcctttcaccatctggtaatctctggagttagttgttatagttgtctctggttagagattgtttctctcatgattctgttagcctctctcagtagacctgggagactagctctctcctctgagtttcagtggtcagagcactctctgcaggcaagctctcttcttacaggtaaggtgcacagatatctggcttttggacctgcctcctggcagaagatgaagacccgaaacaggacctgtcccagaagctgtgttgctttggtctgtcacagaagctgttagcttctgtagtccacactttcacctgggcagactagtctcagagggatccatgatccaagatggctcccccagatgctcctgcaaagccctcccgggcagggcggacacctctactctggcagggaaggtgccccaatgtctggagtccaaaacggggtctggctcagaagctgtcctctagggatcttgggggtgtccgccaactctgcgcccaggtgacccagtgctggcaccgaccggaagggccttgtgaccctggtccggccggttttcctgcttccctaatgctgtctcaggtactgcatggttggattggaacagaagttgtgttccactcaccggtggtcctaagattgcatggagagtcatctaggggaccttggaggataggactgagcattctaaagtctcttaactcgcaccttgatcagttgtgggtctctatgttaatttttatttactccaggaaggaagcttttctaacaagctgcaccaacctgtgggtagaacactaagttctcaggagttggtggaatactatgcccatctagcagagtatttgtaatatgtccttccctaaggcctgtgacttgcctagcttatgtttcttgactccaataatggtgctaggtatgggtttcaactttgggagtgggccttaaatccaatcagaaagtgattggttactatcacactattcatgccagtattgtactaaggggcatgtctctccagggctgttgttattgtagttgacaaaattcacagttgtgtatacgagtgatgaatctttttttcccctctggtatcgtgcatgatactttctagcactatgaaagctaatcagtagggaagaggtttcctagtgagcagcaatttgatttctttatgttgtaagactcaagtatgtgctgtcttcatgagcagggtcttaaccatcaagttccagaccgtaatcaagtacatgggcaatatcctgtagcatttgggttctatgggacttcatttaccaacaatgctaaaagaggtaacccattcctgacattgcgcctttatttgttgttgtggtgtttactagggacatttgtattttttatcctttgagtactatgtttagttccatgtctcattttaaaaagagttatttgttttcttgatatttaacctttgagttctttgtttattttagatactaaccaccgtcagatgtatagctggttaagaattccccccccccccccattctgtagatatcatcacacaaatgttgatatcttttggtgtacaaaagctttttagtttcatgagatcccatttattaattgttgctcttaatctctgctctatctttgtcctattcagaaagtcctctcctgccaacaaattcaagataattccctactttttcctcaattgtatccaaaatatcagttcttacactgagatctttgatctatttggtgttgagttttggcagattgagaaataagaatctattttcttctgccagcatgacttgtagaaggtttactcccatctgtatcattgccacgcttattgcttgcatcttggttgaaaatcagtaagacaaaagagtatgggcttacgtgtgggttctcagttctattccactgataaacgtatctatttttatgctgttactatgctgtttttattactgtagttctgtagcataacttaaaatctgggatggtgacctatctagccattcttcattgttcagggttgtttttatttagtgtttccatattaaatttaagaatatttcaatttctctgaagatgtgcactgagattttcatgaggactgtattgaatctgtaaattgcttttgctagaattgtaatttttacaatgttaaaccaagaatacagaagatattcctatcttcgggtattttctactgtttcctttttggaatacagttttcattgtaaaaatctttcccttccatggttagatttattgaaagatgtttttgagaatactatgaatggaattggtttcctggactcactctttctttctttctctctctctctctctctttctttccttccttctttctttctttctttctttctttctttctttctttctttctttctttctttctttctttccttccttccttctctctctctctccctccccccttctctctctttcttttcttttctttccctttctttccctttcttttcttttcttttcttttcttttctttttgtttttttgttttttgtttttttttttttttttttttgagacaggatttctctgtgtagccctagctgtcctggaactcactctgtagaccaggctggcctcaaactcagaaatccactgtctcctgagtgctgggattaaaggcaccaccatacctggctcctggtctctttctaagtgtgcttatcactcgtatataggaaggatactggtttgtgtgtgtgctaattttctatcttgttattgtgttgaatgtgtttgccatcttcaggggattactgatcgttaggatcttttacgtataatatcatatcttctgcaaatgatgacactttgacttctttcttttctatttgtatcccctttatttccttcattggtcttgtagtctcagagatgcagagataggtcagctcatgtaaatcaacaaacataatccaccacagaaatagatgcagagaagccaatctcatggtcgtctcattagataaaaaaaaaaataatatcccttcatgataaaagtcctataaaaatctaggaatttgggggtcatatttcatcatagtaaagataggaaacccataggcaacatcttgcccagtagagaaaaagtaaaagtacttccactaaaatcaggaacaagaccaggatgccactccccttccccatcccaccttgtattcaatgtagcactggaagtcttgttctgtttcttgcatcccctcaatgagaacttgctaaataccctgcctccaggcctggttcttcccctattctctgtgtgtgcccatgatcctgattgttctcctgttgccacactctgccctgtgatttccctaccccagctcacacccctgaaatattctcctggaattatcctgagtgtgcattctccttctcactggaacactgagtggaaagaaagttttagagatcatgttctctccatctcacactctgcaacgaaaaagtgtgaagcacagagaagccagcattttctgtgccagctattgagagatacaaccagatgtggaaggctcacagtcttgcttttttttgtccagtgatagactgtttaccccactgaggaaagccagtgaggctgggcaccttctccatgtccttgaaggcaagccaaccatttgagatcatggcacaatactgtcatttataaagttcatgcttgagaactgtacagccagttaaaaaagaaagaaagaaatcctaaacattttaagtaagtttgtttacagttttgtttgggccacatttataattatcctgggtgtaggtttaacatgtctgatagagtattctcattgctccaaatttttccatgatgactttcaaaccagttctcagttcttctgtacttgaattacatctcttacagcgtttgcttatcctctatattccataatgaaaaatgctacaaagggacttttgtgtgaatctgatttaaaagtcacataggcacatggtttgtgtgtataactaatgccctgcaaagtaatctgttttttggtccccaatgaaggagctagagaaagtacccaaggagctgaaggggtctgcagccccataggtggaacaacaatatgaactaaccagtacccccagagctcatgtctctagctgcatatgtagcagaggatggcctagtctaccatcattgggaggagaggtccttggtcttacaaagattctatgccccagtgtaggggaatgccaaggcaggaagtgggagtgggtgggttggggagcagggggagggggagggtataggggatttttgaagcggaaactaggaagggggataacatttaaaatgtaaatgaagaaaacatctaataatttttaaaatagcattatttaatctaaaaaaaagaaatgtaaaatatttagctgtttaataacaccaacaaactaaaatgtccacaagtcaatatttctctgcagggcttccatcacagcacgtgctgggaacagttattgggtcatattcgagcttgggttattgacagttggctgtttttgaggtactaacacaagataaatagccaataaatatttctctcatgaatgcacgtttatgctgttgaggggctactgttgctgtagttgattgatctgttttaatttcgctgcccaatgttctgaattcctgaatgaaagacacacacacacacacacacacacacacacacacacacacttgcacatgcgtgcatacgggtgcagccttctgttttaatatgccttaattagctcaatggttgggtcactcccaaacttccgcattgctagtgcctcccctccaatacttctgaagtattgcttactaaaatctatattccatctttgctaccctagacctaatgttgggggccctgggtccacttttcctttctcttctgtatgtctcaatcctagatcttattcttttttctggcatggcgattctgcttcttccttggtccccttaccaatgaatcctaaagtctcccctttgtctccttacccagccattgaccacagcaactttatttaccaatcagaaccagttagaggcaggggccctcagctcctcacatgtgggattctcatgtaatttagggacccccaaataacaatgcaaatattaaaccaaatccacaatatttcccttttttgtccactaaaaaggccttttctctcagatatacaatgaacatagttgtaacagttaaggtatgatatacgctaataatgttcatcaattttgtcaatttaggtacatactctaacatctatcctaacttaaagagtttacaattctattcctgaattatgttttgattttaacttgcattaccatcttaaaatcatcctttcgaatctacattatcttcctcaatgtctaacaacttaattttgattatgaaactataactagtcttcaaccgcatcagagatctgagaatgaattaaatgtagcctgaaaatgtaggaagcacaaaaaaacatagcttccaaaacttaaacaaattacagagacagctgactactacctggaaatcccctattcatcaaaacgttggagcatctgtcttcagctttctggcccagaaccatctgacagaccttaagtgaagcaggaattatgaaggactagcttactctgtattggcaaagctaagctgttgactattctgcatcatgtatcctttcctggacagtaatttttgtctgtagatgaattagggaaatctttaccagtggtgaccttgccacaacaggaacaactctatatggaggttatgatgctcagtatcttctttgaacaatgaatgagggtactgtcaggagcagaaatgtctcttaatcaaacatctattaataatgcaatgattttaaatgtcatactctgtggatttctgattcttttgaagactatttgtatatagtatatctgaagtgttagaccttgactactattagctatttctagttgaataataatgaaagcacctcattataattagtagccattagtttactaattaattaagtaattaagcaatacccttaacttgcattacttaatcatcctaaagagtttgtaatagcagctattagaaggactggtcaaaactgtgtattcttaaatgagttgtgtaggcaccatgcctatctaagagtaacagtactaatttcaaatgctttatcaatatacaaagatttaatcaatgaaagccttcaacccatatcaatatacaaattctatataaatataagtaataacttcaattttgcatcaaatataaatatttctactaatgtaagggtatgactatacaatgctttgtttatgaatagttttagtaatccatcccatatatctagtatcttataataaatatcactctattcccctttttcccttcaacccccttccttctacctaggagggaaaggatagagaagaggaaaggatggacagaaatcaccaagtctaagttctctatttaattttctccctgttcaaaattataaccatttccaaattatcccttaaaatgacaaccactctataatttataaaataaccacaaccagacacccaaacccaatgaattgagatgacgactctctataacttcttcctactgaattggggcaatgaaaaaaaaatttaaggggtgtggaggggtaggaaaattagaaaaaatagacttaagaaagctagctttagtatctgttatccagtctctgtactcttagaaggctcagggcttgactaagattctgactagatatgtctgaaaggctggatgaacagagtccattaggattcagcagctattcctgaagctgttctggaagcaagtctctgggaacagcatcaggaggaagggaaatggagcatcaggtcatttcagcatccccgcagatgaatcttgtcagagctgcatattcagcaatatatgaatcttacagccaaaattttagtactgttaagatggattatgcaagatgcacagaatagttaaggatgaatttttgccccttgtttgagcaactgaaagatgactatccttttatgagttaatctgatcaataaccaattgtaatagatctttattcgtgccatgtggaggatgtttagataatgtaagagcatcatcagagactatctttccctgtagcaattgtacctttctggtagccacaatgtctggcagcctccagacctggctaccaagcagtagctgtggtctggattcacattcagcaattccttctttcaaaagttttgctcccacaaaatctctttatgggttcatgcccctcttcttcctccctccctcctttacttttctacctccctccttcccttccagcaataacaataaaatgtataaaccaaagaaagattcattattctctcaaacttctagggaacaacttaaaagatctttattacagtatttccttctgtagaataatttatttcttttcagcttgggaactcaccccttgttatctcagtagactagagccttctacttcaaagcctagggactgtgtcatctcaaacaatgacacgactttctttgaagcaaattctacatttttccagaataaagaagtacctttcaaatatttctttctgctttgaatagcagttttctttgtatctgataaatgtcaacatagttatgatgaataaagtgcaaatttactgaacatttaagctatcatagtagatcctgtcattctgtactttttcaatcaactgatactaaagtataattactaatgtgtgtgggtttgaaaaatgtttaaaattttttttcaatatttcaagaagagtgggatttttttctgagatactgccttaactccaccccacctcagaggtggaaactaaatggtgtcaatttgaacgaaggttttggcctaggttatgagctaatatttggagggttttatgttttgaggagtatggctgaattaaactagaggtaagacaaaaatgagctaaggaacctagagatagtaagagtggttgtgttagaggaagaaatgggatctttaagagaggtgatttgggcttccaaggctctcacaaatcagtggttatttaggagaagttaatagaaaatggaatcattgttcgaagtgaatctcccaatcttggcagactccggtagatgtcagatccagcccacagtagataaagagtcagagaaggtatagaagaaagaatgtgagtgaaaacttgatatttccaccatattttcatctatttttgttgcttaaccactgtgatggtttgtatatgcttggcccagggagtggcacttttaggagttgtagccttgttagagtaggcatgtcactgtgggcatgggcttaagaacctcatcctagctgcctggaagtcagttttccattggcagccttcagatgaagatgtcgaactctcagctccccctgaaccatgcatgcctggatgctgccatgttaccaccttgatgatattaaggattaaacctctgaacttgtaagctagccccaattaaatgttgtcctttataagacttgccttggtcatggtgtctgcttatagctgtaaaatcctaagacaactacttcagtaaaatataatgtatatggcacacttactcactgtaagtacattatagtttatagactagtgtgtttgagtaagaatgttgtgtatcaatacagtctttgatattttcatcgttccccaaagttcccagtcaatgcctacacctgtgcttgctctctgacctcaacgtgcatctgctttctgtctctatagatttacctttttctggaaattttataatggatcaatacaacatataatatgtatgtttgtctatgttcacttggcattatatttctttaggttcatccatatttcagtatgcataaatagctctgtttctgcggaatagattctattgtcttcgtatattctattcgggttatctattcaatggctgggagacacttgaaaggcttctacttttagctgtagtaaatacaagcagattatagcactaagtgtatgcaaatgtgttaaatatgaaaaaaatgtaaaccctaggtattcatctggtcccacagataagaacaacttagtctataattctttcttgagaatttgtatacagatttttgggtggacagaggttttatttctcttaggtagagacctgtgaatacaattgctagtatatatgtttagttttgtaaagtatataatatgtttacataacaacactgacaaccctttttcctaaggcaattctgtatttctaacatcagtgcctggaagtttcagtcttttatgttcacaccgtgatgggtaatactgattgtcagtttaataggatctagaatcaccaaagagacaaatctctaggcaagtccatgagagagtttctagactgggttcatggagatgggaagatctaacctaactgtgggtagcatggccccatggtctggagtccataacaaggggaaatgagtgtggaattgctcaacttgtaaaatcacttggtgcctgaggacctgagttcaatccccaggactatatgtgccactttgtttttttaaaatcaactttacataagcttgggtcatcttggaagaagaaatgtcagtggagaaaattgcatcagatcagctgaaggcaagcctgtggacattctcttatttaatgactcatataggagggcccagcccatcgtggcagtgtcctttttgggcaatcggttcttggttgtatgagacaggaggaggagactgagcaagccaagggtagtaatttagtaagcagtatttctctatggtctgtgcttcagttcctgtctctgggagttcctgctctgccttccctttatgatgctctgtgactgggccatgtcaactgaactaatctcctcttcctgaagttgcttttattcatggtgtttatcacaacaatagaaaaccaagcaaagacactatttgaaggtgaaaggagacaacaaactgcatctggctttcctttgacccccccccccccttcatgaattctgtggcacaggtgcccccaccatgtacaaacacatataataatcatttaaaacatcaaaaggagaggatgcgctgagcctctgtattcatctttctgccttcttactgtggatgcaatgagactaactcaatctcttgccctggggcttccctatgatgaaggatttacttgtcaactatgaaacaaaatatattcttccttccttccttccttccttccttccttccttccttccttccttccttaagtaacttttgtgaagtattctgtcaaaataacaagaaacaataataactaaaaaaaaagattgggactaaaagtatatccatctctgtgataaacttagccatgtggttcttgggtctttggaattgtttcggcaaagagatgtggaagagtttgaaacttggagctagaaaaccttagaatgttgtaagcagatctagttagcctggagggtacccagaggcgggtacaactgtgatccaagggggacaggcaatatatcaagttattagaacttggcaatgcagtttgtgccatactggtcttacaggtatgatagatgcgtgactgagagtaattgaaccttgtcccaaggttccagaaggccactggaagcaagcagtgtgtgaaagggttagattccctgcaaagaggctctgagaattcactgtgtgaagctgtaaatgtgaagtgtaagtttccatggagaccctaggatgttagaaatggcaggaccataggatgccggccaaagaaagctgcatgcacagagcaaaggcatgcaaggaaaggctgtgtgtgttgcactggtgacagggttcttagagctgagttcagtttggagctcaggtgatttctttataagcctcagatgctgggcatggaactgcaggatttgtgtttgtcttactgggtgtcagtcttgtttggtccatctttactttctatgtcccaattccttcctctgggagtaggagtgtctgctttgtgctctttttaggttaggagtatataactttccttattaaaatgttatcagggctcatagctaagagattgcatcagtttcatagagactctgcatttatacttttgaacactgaagactgaggactgtagagattggacacattttgcatcttgagtttagggtgagaagaagtagaaagttatagcttcagagtgattatgtttgagtatgaaattgacaaggagtagacctggaatggttaacactaatggccaatttaacaggatctagaattgtaagagtctgaaaatcactgaaggaagaccccagactcatagtatgcaaacacaaaaagcatttattctgcagaaacaatcagcatgaggggggcaaacattctttaaaacggtgaccacagagaaagggatgcaggccttcatatagggaactggtggaattctctagaaggattaggtaattattagtgggtgctaggggctcataggtggtcagtgacttgcatatgtcataaacattcaatcatgtgatgaaataggggctgcctagcacaggtggcttgttctgcgataaggtgtttccccatttttgtggttatccccaggctgtttttggtaaggaatttttatgattttgttcctagagctggtgccttataacttagtttctaggacttatggtctattcctgaagctagtgtcttactgccttttttgaaatcaggcctagttcttaagtggagacaaggggggtttatgttgtcttttcagaatcatgtagaaaaaaaatctctgggcaagtctgtaagagattggactgagttagttggggtgggaagacctggcctaactgtgggtggcaccgtttcatgggagttcaggactgagtgaatagttgtaagtgaattgcacacaagtggattgtacattagctttcatcttcctgcctcctgactgtgggttctagctcccactgatccagctctccaggtcctgtcagtgggtttgatctatgcagtatcagcttggattgaaggggctccctgagacactgaatccaactcagacttttataggaataatttgggaatctctcaaaatatgcctatatgtactgcacttgatgcccagaggaatctgcccataggatataaactgatagttttctaatagcctcctgttgattctttttttttttaaatttttatgggttactttttaaaaattagatattttctttatttacatttcaaatgctatccctaaagttccctataccctccccccctgccctgctcccctacccacccactcccacttcttggccctggcgttcccctgtactcgggcatataaagtttgcaagacctaggggcctctcttcccaatgatgagtaggccatcttctgctaagtcgacctttgagaaaccctgtggagagcccttgtatgattggacctagtctgggctgagctgcatttaagaatatattgtgttagcttttgcaaacatgatctctccttcttaaataaatggaaaaggaagacagtctcatttttggagcattgtttcaaacaaatgactatgtttaaggtcaattatccctctgggttgggctctttttttttttttttctttttttaaccttcatgtgggggaaggaggggaagcaaggctcactccatcacacataaaaggaggctcttactctcagagaattagtgtctttcttgtgaaaggctggagagtttttgtgttgcatagcaaaccacccaaacaggaagatagaaagagccttcgaagtaagcagggtgcttggccccagagaactttgaaatgcttactcccaattcttcaaatacttcctcattagattatggttatttttggtgcggttctaacaagtttgcttctctggcttcccagttgtctggctagaagcagaaaagggagacaagtggctcacagcaggcacattaacactttaaaacagccaagcagaagccagagtgtcctgggtgcggaaagggaaatggcatcctccactgaaaagttactggcttcagccagttaatctccatgtcctttataactctaaagtacaatgtgtttgagataaaagctataaaaagctggagaaaagcattcaagaatgaaaaacatagagatctgggtctggctttggggaaccgttcacagcctcgctgctgctcctgagggccaggctgagccacacacagcatggcacctgccttttgtgctaaggatgctgaatcattagatgagtttgtttttatagatcccttttcccagggctggaaagcacacaagttagacagattgcactttaaaatactcatcaacgtttttgctgcttaaacatccagtgctcagaaaaaaaaaaaaaatcctttgaaggactgtttcccatatacattcttttctgtggcttgattttcttctctctccttgacagttccaatagttgtgaccgtatcttgtgtctttgtatcgctttgtgttaactcaaagcatttggcaccccaaattgtactttgtacttggaaaagatttctagttcttcttactgtgtatcttattgaactagaacccacctgcttggtttcagaccctgggacaaggggctaaactgcacatcttacatatgaaagcagactggcctcctggttctctcagaattcctcagtccggacttggcacttcctatccccaacccgcacgtgggctgggctgcccttcccccataggctcttccctatatattccagacattttgatctccccacctctgccttttcctcttcttccccccacccctttttcattctctctgtgcacaaaccttttctctttctcttccacctgccccttcttcttccacggtggtgcttccctggccttcctccttgtggctcaatcgtgaactggcctgctagagcaacttcccaaaaaacccgagtttatatgcacattttaatctgatttgaatggacttatttcatctataaaaaaatagtcttctaacatggttttacggttactgataagataataggtctgttagagtactagctccctgaggaaaggactcagcggctttttccttggttcccaccaaacgtccataaatgagtgggtcttaaacaactgagtccatgaatcggcgaatgaaagaactgtaaaggaaagatgtccttcatcttcttctaaggcctgtaggtttgtcttcctcacttctccatcccccatctcctatcctgccttttacctcccctgtactcaggtgtacttatcgaatattaaactgactttatcctccttagattagactcttccatggtcactactaaagattctttttagtttatttaaagttctaagtgtgttgtcacagatttttcacatttcaaccccttagtcaactttccttggtaacacctgaaacaatttaaggagaggccaggtttctttgggtaatcgttctggaagtttcccatgactgcttgctttggttccatgaatcattgaaagacaagagcagaggaagcctcaccctgcagctggaagctaaaaagggaaaaaggggcagggacccacatatccccttctcggacccacctcccactcctgatgacttaagacttcccactagactacctctggaaggttccaccttcctttaatagtaccacatgctggaaaccaaccattcagcacagggtactttggtacaaaattgcaaaccataatggtacctattatagttactttttaaatagccaggatgtaaattccaggatggaagtggatataattttttccttgtgtgctagcatagtgcttggatcacagttggctctttgtgagcgccaggggaagtaagagaagatggaacaggtctatatgatggaatcggtaattttcacgattgagccccatctagagcgacttttgatttaacatcaggtttatattaatttcataaaataattgcatagcttttcatctacttatttaatctatgcattggaaaaacattaatttttaattgtggtaaaaatacatagtataaagtttacttaccattttgaatattttaagcatattatttaccagttttatatttctccatgtttttctgcaatgttagcttattttttttctttttttgtttgtttgtttgtttatttatttttttatgttgcctgtggtactgggagcaagaggcatcttttcgtggtgagcatattttctgactcttactatgcatttaatttgtatgtgtgtgggtgtttttgtgtccatgtccatgggtactcatgtgcacatgaggtaatagactgacaacatgagtcttcctctatcactctctattttactttttgagtcttggtctctccttgaacctgcagtttgatgattggctagattgccccagagtccctgacaccaggaatctctctctacctaccagtgttagaatctcttccctgccaatcactttagtagctgagccctatccctggtcactgtgtatcttctttgaagccatgtcaattagttttttgctcatatttttttcaataaagttttaagagttcttcgtatattctggctattaggtatttatcaggaatattatgttcaaatgtgtttccctctttatttcctcaatgactatttcactcccttgatttctttatttgaggtatagacttataaaatgttatgttgtacctttcttcaacctcacttctgttgcgtctgctttgggtatcataagtgaaactattaccaaacccactgtgatgaagctatgtttttctaagacttttatataacctgaggtattaggttttgagaccattttgaattgatttttggcacatcatgtaacaaaaggatccgtctttactggtttgtgagtagatagtcagttttctcagttttggttgttgatgagactgtccttccttggagtttgggaaagatcatgtgactatttgtttgtgtctaagagcttgattctagactctgcatttaattcttttgggctgaaggtctgtctttatgctagtgaaagactgttttatctatggcagctctgtcgttagttttgaaaccaggaagtgtgagttatcctgctttgtcctttttcaatattaatctgtctatttaatatacacattaagtcttgacaagaatgctttaatacattgtcctttatctgcaaaatatatctttgagattttgacagacattgcatataatattatttttttgcttttacaatatgaaattttaacaatattagtttttcagtacctgggtatggaatggttcttttttttaaatttatttgtgtcatcttcaattttttttctgtagtgttttgtggtttgaattatacaagtcttttggctccttgactgaatttatttcattagttttgattgcctatgtaaacagaacaagttttgaaatttactcccagattattcaatggtacataaaaatggatttttttaaaggttgattttatattttgaagttcttttgaatttattatctgtaaccgatttttttttttaaagaggaaaactttcaagagtttctagatataagactactttatttctaaagagaaagacgtttccagcttgagtgctatttgtttagtcgaatttcgctgtctaggataagtggaacattctatgctaagtagaggtggctaaactaggcgttcttggcttgtttctgatcataggtgaaataaaaacaacttgtagtctttcaagttaactgatgttaggatgggcatgtgtatgtccttatgggctcatgggctcatggcctcatgtgttgaagatgctggccctggatgttggtgccattgagaggtgattgggtcttgtgggtgttaaccttaccaatgggttaatcccttgacaaatcataagaaaatgggtcattaggatgtaggatctagctggagaagatcactgaggacttgacccttcccttccctcccccttttcctctccctctttctcttcttcatggctgccatgatgtcagcagctttgctcttgtataatctcctcccattatacttggtctccccatggctaagaaacaacagagttgctcatgatggactaaaactatgagccaaaataagtcttatttaattttactttcttggatattttatcacagcggcaggcaaccgattggtaattatgatgctatttgtgagctttttatagatgaccttcattatgttttggtgggttctatctacttttgagtatgtgcttggttgtatgtgtctgatcatgaaaatgtgttggaccttaaaaagcttcttcttttttttttttttttaatgtgctgtgttatagtgactgattttcataagttgagccatctttgctttccaggaataaatactacttattgtgtataattctattaatatgttaattaaatttagtttgttagtaacttgtggagatcatcccgtcaacattcatgaaggatatatctagtacttttcttttaggagttttgaacttggtgttcttggataatatacgaagatatatcagtgaaaccgttttgtttcagaactttgaaaaatattttcagtttatttcagtattattcatgtatttacaaggaatactgatctggggagatattaaaaaatatatatatatcctacatacattgcaatttagctgaattttacattctacattaccagaaataaatatggtgacctgtgcatgctttattttatttgcctagtggctatttcattctttgacttttcaatggtgtatgttttacttttaaatacccacaatcaacatagacacaaaacaacttaaataagggaagatgtcttttgcctcagagcttcagagggttcagtccatggtgctctcgctgctggcacttggggagaacatcgtggcaatgggaacatggtgagggaggttcttgatggcgtactggaaacagagacaaggaaaggggttgactagggaccaggtgtaaccttcaaaggtgtgtcctagtaacctacttccttcaactagcccccacctactaaagtttctagaactttccatgagctggagactagttgcttaatacttcagactgtgggtgacatttcacacttaaactatagcaggaaagatgtgtgtgaagccttgaattcaaggctctgagcatgccaagcaaataccctatcttccctttaattttataccttatcataatctttaatttttttatgattttatatttgtgtttatttcatatgtgttactgaatattaaaagagacaccctgagggtatttgttgatggtagactcttatgtgacagtgggaatgcgctaggtttggtcttctcttttatggagagctgctctatggtagccaggtgccaatttgtgatgtttttctagctctaaaacaaccctttttgctttgattgtttttctttacatttagtataccttttccatctgtcaacactcccacttggatcttactttgatcatttatttccataaggaacgttctttactatctcccttttccttcagaataaactttggtggcttttagagttttatacctctacatatgtcttctattgcagctcatgaaaccctgacatcaattaagttgtctagtgcaattattcttcttacatgcctttgcctacctctaaacctttttgtagtatttgtttattttgaaccaaatttcacatgctttggtcttggccttgacctccccatggagcctgactgctatgaactgactgctatgaactgactgcctcctgatttctgggattataaccatgtgctacggtatcaataacgaacgcagactctctgtgttctacttttgtacgtttgaactttgttttatttgcatacaaatattcctttctatataacaaaatcataccaactatccttggctcaaactgaccaactttttgagtcatgcatttgttgttgttaatgggatggttttcacacttgcattttaaaaataagtctatttattttgatttttacatgtatatttgggctacatgtacatttttgtactgtatacatacctggagtccaagggagccagaagagggagttgatcctctggaacctggagatactgatggctgtgagctgccacatgtttgctgggaactgaatctgggccctctggtatgttcttttaaccagtgagctgtttttccagccctattcatgctttacaatgtcaagaagtagttttcctccctgtgagagaagggcaggaggagaggctagggtaagagactccctagggtaaatgcagttgtattcttgttttggagatgggtgggtcatttatgctgtttgtttcattaattttaaatatagaacagctaaaagtatgtaagcaaaaggggccacacgtagacctgtgttgagagtgctttaaatcaagaattaagattagtctctttttgtgtcactgaagaaaaaataagcccgctcccccccaaaagacaaggaacaaaaaatcaaatcaaatcaaaaccaaagccccaacttttttctttgtcttctcagtcagacaccagtgcctccagaaccagaggcttggtgttgtcttgttttaattctccaccatgtcttgtattttactagaagccaagacattcgaaattttgaataatagaattatgattatgttccagccactttcatgagtgagtgggatggatccacgcaaagagaattttgtttctcattctctttaatctcattctttcaacagtttcctaatctttctgggagacagagacttctaaaaatgagaaatttgagctgcacgacttctcttttcaaaattctttagcgtcatgtgtctttttatgttatgccaaaaacagatttggagatttcccaggtaagcaccgaatatctacaggaaacagctgcgactgaataattcagactcaaggactcaaaactcccgataatggaatttatttcatgtttgggaggtacttctaagaaagaccaggagatgggctattattgaacttctgctttccagaaatcttgaagaaatgaaaaaaattaaaaggagccagctattgtgatgtacacctgtaattccagcacttgagggttagaggcaggcaaatctctgagtttgaggacagcctggtctggagagagttccaggacagccagagctgtgcagagaaaccctgtctcaaaacaccctaaaaaagaaaaaagataaaggaaaaaagaaaaaaatattaaccaaccaaccaaccaaccaaccaaccaaccaattaactaccaaaaccaaaaaagctgaaaggcagaatgaagagtcaatttgaaaaaaaaaaaacaaaaacatggctccttgggttcattagacataggttgataggatcaaaatataatgtgtgttaggatttagcagcagagtcccttggtggattggagcagggcagtggtggcacacacctttaattctagcacttggggggcagaggcaggtggatttctgagttcgaggccagcctgatctacagagtgagttctaggacagccagggctacacagagaaaccctctctcaaaaaaacaaacaaacaaacaaacaaacaaacaaacaaatccttggtggcttggagcaaaggaatgctggggcagaaatcacaccatacaacaggtctcactgaagattttgttttttgtttttgtttcatttcattttattttattttttacaaaggctgcccctgagcaaggtggtagggaaaagagggcaggaagagagggcacttggtttttatacagagatacagcgcatgcacatagggagagtgcgttgtattttgcctgctgctgctgacttgctgttgttgctgggttacagaaggtgggcttaggggtggggtttccaacagtgtgcaactttgctttaagtaaagacttgagggctattctttgttcgtttgttagtttgttttttgctttgtttttctaggctagctttaaatcttcttgtacttttgtcttcatttaggatctttaagatgggcaacacacttgtagttattaagagaggcaagatggaagtattttattacttaattattacttacaggccaataagaacatatggatacctgtaagacacacatgagggctagggagtagagagagagaaaaatggggacctgtgagccaatgcctttaatggattcagaacacattatccaaacaagtttttctgcaggaaatttttgtcagtggatagaaaggaaacttcaagaactccttctgtgatggagacttgtttctatagtgactttgtgcaggctgtgcagcatgtggaagtgaacaaggtctgtcaagcagattgtaactgccacacagggaagtggctactgagaggcacttctatgaggcagataaccggattgaccacaatgaggaactaggaacgtagccaagcgtcactcgcttctgttatgagaaagttcgacgtatgttttaagtggttgatggtgcaatataaaattataagaattctccataatagttccttttcctttcagtacacatgaatcaaagcattcccacacatctggaccacctatctgtcctgagcatcctctgattcatctctggatctttctttggtattttttcatttctcctttcctctgaattctgttcaatgtggcccctaaacactaagctatccacataacttgcctttaacatccaggttagaatctgtcacccccaaatctatctccttttaactactttgtgcagtatgcctgtgcatgtgtgttgtatatgtgtgtgagttatatgtatgtgtgttatgttattatatgtgtgttatatgtacgtgttatgtgtgtgtgtttacatgtattacaggtgctcacgaaatagaagggcttggtataaaactttctgagcctccctccaagcctgttttaaatgcagtgtcagataagaaagtttaaaatgtaaatgcataaaatgattaagggaattataatgttagtatatatttattagtttaaatttgtgatgtttcattcttataataattcagggaagtagcaagctagtttaataaacttcagaggcaacctgtgtgtaagacatttgcagacacattcaattaagtgtctaacttggttttttccttctcctcctcttcctcctcttcctctccctttttcttccccactcctgctttttccttctttgcctgacattaagaaagccacacagatgaaaatggcagccttttaagaactgtttacttaatttagctgttacagtatttttaatagcttgttccataactgatacagtagcttaaagagtaggaaatccttgcttaaaatttaagtcacggcaagtaagagtgcaatgtggttagtgaccattaagtgctcagctgaaggagtcaattaatggcttccttggccagtttaatttgccaccatttggcagaaaatatcgtggggatgtatcttgtcccttaattgagagaaccacaaatgtcacaggattgaatttggttgcacaattttaagtagacatgtgttcatgtgtaggtctgagttttgtaaaaatggaaaaaaaaaaaacaaagcaagagctgtggttttcctaatcagtgttagcttgtaagaggtccaatatgttcctagtgcagcttgatggtcaagggtcacagagcaaaagcacagtagacacaacagccagagtcactcgggaccttgtgccaagagatgagagtgaaggaaagagagtgtggctgccttttaacccactttagcaaaggagtgacacagcttaacaatgaaatgggaatccagtgactgcagaggcctggtagcagcttaaatacggtcctctggcatgatggaggctggtctgggaaagctccaccctgtctaatgcctttccttttcaaggtgtgaacagtgaccatatggtgggtaagactctagaatacgatcaaagtgtgtgtatgaagtccttagtctttaaaagtcaatggatgagtaagttagaaaagaagaagagcgattgtaaactccaccaaatgagattttcctgtgtgccgaacacagaagcattcataacaaaaccaggatttaaatattgtccttcctatattatggaagaaaatagaggcattgggagattatgtttatgttcagggttgttcaacttatatgttcatcagagcctggatttgagtatatgtgtgtttatgtgtgtgtatgtgtgtgtttatatgtatgggtatatatgtgtttatatgtgtatgtgtatatgtgtgtatgtatgtatgtatgtatgtatgtatgtatgtatgtgtatatctgtgtgtgtgtgtatgtatgtatgtatgtgtaaaggacagaagacaaccttgaatatcctttcttaggtgccacttaccttaccttttctatttaaaaattttcaatttttttcccccttctaccaactccttccaaattctattcaactacctacccatctaacttcatgttttctctttctcaaaacagaaacaacaaaacaaacaaatgaaacaaatgtaaaaacaaacaaccaaataataacaccccccccccagcccaaacaacagaaaacacccacaacacaacaaaataaaacatggagttcgtttgcagtgtccaactgctcctggacatggggcccacctggagtatggtcgatgtacagtgatacttcgttgttgaaagtgattttgccctttgccagcaggtataaattgcaaatagcttcttggttaggggtggaaccttgtccactttcccctccttaggactgagtgttgcagagtctctcgctttctgcatgttgtccagttgtgagtctctgtgtgtgctttttttttttttttttttttggttttttgagacagggtttctctagaaggggtttctgtgatgagggatgagcaacatactgatttgaggcccagcttagtgtatcacggaagggaggggaggggaagggggggaggttaggttagttaggttcctggtagagagtgattctccaggtcagcatgagtcacagaagaatggaaatggactagaaagcaaatctgaaatggcaaggggaagaactcactcttttcttttttgaggcagggatttccactgccctgcagtttatccagttgctctccagtaagtccatcttgtctccactttccctgtgctgggattcccctaggctgccatgcctggctttcaactttttttaaaatatggcttctggagactgaattccggttctcgtgtttgttagaaagcattttactaaccgaattaattctccggtcccatttctggccttttagtctcccagacccaaattttgaacccctagactataccaacgaaatgcattttgcgctacggtcctatttatttttagtttagctgtaactgattttaggcaatcatgccaggctgctctttctgtttcgattctcatttccatggaaatgtgatgattcttaatcgtctcttaaccttcagcagtacatttgccatcaggaacggaagaaacaggcactgtcttggcttggattgatgtagaatctgatcttgccagccaaccttcccacagtcctttcattgcagatgcacggatggttgcgcatgcggcctccctcctgatggtctttatctctggcaaaagagaagaaaatagcatttaaacaccgaagcccaggctatttttctttctgctttacatttcaatgactgttgattttgtggcttgggaagactaggtttaaagtggatgtaggagaaaaaacaaaaccaaaccaaaccaaaccgtgaaagaagaatgaaagctgaggccccagaattgctgggtcttggtgcagtcttacatttcgctgtagaacaatgcagagcataggagagaaagtggcgtttgtttcagagatgcttatttacagccagtggtcatttagcagccagatgtgctgctgggaaactcatgagagaggaagggggactcatggcgctggcactgttaggatacttggtggttttgtggagagctacatactgggggtgacctggctggaggtagggtgcagactgggaggacggtgcagtggaggggatacttgacagggtctagcaaggttgcctaggggtttgtcagattatgaagcagggctgaaagaagagcagactctggaattgctctcccgcccactcccatcccccactctcccgctctcacccctaccccaccccccaatgatttgttttatttgcttttcaagttaagtcctgttgcgtataacatagcagtctttcctgtaagaatctcaagtctcactggtttccccgcagagctccgttaaaaatgttccgctttcccgatgttttaaaactcttttaacaagtcatctgtttggggcttggaattttgtttacacatcaagaagctagatattaacctctaccgaaagcttgttagttagagcctactcaggaaggccagcctttgatttgagcttgtgagatggctcagcaggttcaagtacttgcaaggaaactctaacaacctgagtttgatccctaggacccacataaaggtgagaagagagaaacggctcctgagggtgcttctgtcacctggcttccagatgtgtgcctggaatgtttgtaccaccccctactgctgctatataaaaatacatatgcatgtacgtatatgtatgttacctatatatactatatgcagtatatatgtaagtatacatatatgttatcatatatactttgtgcagtgtacatatatatatatatatatatatatatatgcatgtatgtatatacatgctatttatatactatatgcagtatgcacatatatgttatctgtatattctatatgcagtatatatatatatatatatatacatatatatatatatatatatatgcatgtgtgtgtgtatatatattatgtatattaaagaatgcacctctgagtaagcctgcagaggctgtgaaagcaactgccagaagtctgtagagtggtggcaaagccccttaacccaagttatcctgaactctgtggccttgactgtactgtcaccccctccacagggtcttcttgcctgtgtcaggcactatccactagatggagctaattcttgccattgttgctccaggcccaggtaagtggaattcagtcataaacagcgaatcaaatgtttagtgagcactcactcaccatgccctgtgaggggtgccagcattaggtgacaaagctcagcaaggagggaccctttggtgagggagggagggcagaggacctctctgtgcatcttggccaaacctgtaaaatgtgcaaggttggccttagtgggtaccctgccagaaactttctagcttactcagtgtcctctagatttctaaatgtccttgtcattccaaaaagatatctttgctattaaacaatgccattttcgtgagaagtcttcctgagaaaatttagtaatgcaggggacagtttctcagcgggttctgttagctgggcaggtgcctgcaaagcctttgtgaggatgtcttccccggctggctcttgggttgctgtctccatccctcctgggtacctccctttggtgctttttatgtacagccaacaaacatcttgacggcaaatgtcaagcctgagaataagaaaggcttaatttgtcacatcaagtacagctgtgtgtggcactgcaatttgcattttaatgtcccgcttattccagaaaagtggcgctttatagatttcctgtattattcatgaattccaaggctttgtagttcaaaaataaaagttcaggtaatcaccaagcataaggggagctaaactctcaagttggcccgttattcccaggtttcctcactttcccatctcttgaagtgtttcgtagtccatccctgtgttctgtattcagacgtcaggacacattcacacagagaggttaattaatgcactacatctggtttcctattggcttcaactttgcaagagagtctacttggttaaaaaaaaaaatcactgagctgcctggagagatatggatagatctgtcacgacaggcaagtgcctgtcagagaaatagatgtagcctcccagatggaggcctgcctgaggatctacagtgtggtagaggctcttggtggtgattctgatttttgaggtatgcggagtgaggctgagtgaagtccaggaattagtctgcctgtcttccaaattatgtgaatttaggctggtttgggttagagagaatctcaggcttatgtgttgaggaggtcttctctgcagaaatacctggaatgagcagtatccaagatggaagccaattggtatgaaagtaccctgcctaaaggccgcctctctatgctcccatgaatttaggggaacaaacacacaccaggggcagatgtgtcctgcccaggctgcttggctggcagcagtgtctgttttctagttagtcttttcagctagctttgcagcatagtctgggctcagtccttctcattagatgtatggtacagtctgaggagtagtaagaaatgggaaacaagacagtctgaaggaccgtgtaaaggataaaaatgaaccgtggagatactgaaagtggaccacaaacggaggctggaggaggctccttgtgagtcttctgctgttacttgattgaaatgctgtcacatgggccatggtgaaagtgtaagatgctattcagatatagcttgcttagtacccggtgctgagtcttgtgctgtatggaggtcttatgtgtgtatgtgtgtgtgttgggtaggtggtaggactaacagactgacagatgatgggacataaccgaagttacagctagggttttaaaagtccctaaaggccattggctttatgcggagaaggcaatttgaaatgtcccccttttctttctaagactaggtttcactatgaatggtggtttgacttagatggtcctcataggctcagatgtatgaatacttggtgtccagttggtggcgctgtttgcatgtgtttagaaaggatgaccttgctgaaaaagtgttgtgggggcggggtttggggggcagctttgaggtttcaaaagctacctatgatttcacatttacgtggcttgttttctgcttggggttggagatgtgaacacccacctgctgctacagtcctctgccatgatggactcttatcctctgcaagcccagataaacctttccttccataagagtgccttagtcatgatgctttattactgcaacagaaaagtaactcgtcgcttggctggcctggaactccttatgcagatcaggaagtcctccaatttgatatgatcctcctgcttctgactcttcagtgctcagattacaggtacggtaggtaggtaggcttctctgtcactattttgattatgtaaatccagtatttacatttgttggagggatcaaatagattttgtttctgattgtgtctaagtgatgtctgtgggacaaagaagtattggtgcagtactgtgtatttcattaattaggtaagtagttaattaatacatgcaactagtagttactgcttgtgtcatactataagaggtagattttgtgctgagcaaggggaagcatggttctcattttaatgcatcttacctcactgcaggtccaaataaataagtaggtacctgtaacatggtacacttaatgagaagatgtcattggaacacagagcaggacactcataggtcttagtctgaggaacaccatgagatgttccaggcagagcagctgcctgtgcgacggtggaagccagaatctcttccagcatggttggccccatgcacccagatggatatagggagatgatatagtgctggtgctggtggggccaagtcctgtgtacaggggctgcatagtattctagatcaaagtgagactcaccagtcttgcccatgactgagcctcccagaatagaacatggtcaagggggccactcattagtccttgttcctctcacatcttggtttcctgatcctccagttactgtgacttagctgtagattatttaatgcacacagaactccctttgtagtgaggtgtgtgtgtgtgtgtgtgtgtgtcttttaaataggtggcaatgtaactattataattgccatccacttagtttaaacgctatactgaactctgtaccatacatttagaaaacgatgttatttaagttctaacacactcccgtaaggaaggctctggtattttggttgtataggtgaagggtagaggctctgagagatgaactaatctgcttttagctttcattaatgataggattcacacccagctatttgttctagaggtgggtcacagactccaaaacatttggagctcagagaaagaataacacataggtattgatcatgcaacaaataaattattagtggggtattaagattaatttgtgattgattttagtataatgaaaatatagagagataaatgttaatatctttcaggttggctggcattatatagctggatagtgacatatataaatgttttagatttatttattctcttatatatgagtgttttgactgcataaatgtatgtgtaccatgtgacacccatggaggtcagaaaagggggtttgaacccctgaaactggaattagagatggttaactaccatgtggggtctgggaacctaacctgggtcctctgtaacaagagacaagtgctcttaactgctgagccacctctccagtccacatatgtattatataatatgatacatgtgtttcacagcatctagtcaatatgacttgtcttagcaaaagtataattaatagtgatctttctttgtatttgttttatcattacatgtcaagaatgaaattttttagaacacttgcttgaagccacagaataagaataataattgtatagtaacttttctcctaggagcagaccatcgaagaacaactatcagtaaataactggattcagatagagtagagagaagagtcctgtgcaggtgcattattttgagtcagggctctgaaatatgtcaggaacagcacagtaactgaagcaggcaacaaggagaggcaacaggacaccattctagtaatcaaataagtgaaatacagggtgcattttcccgtgcagctaagatctaatgactgggaagtgaaagggaaagaggaagagatcacagtaccacatctgctttgagggcatgctctcagtgactgacggcttggcttctcagtagttcccacctcttaccatcaccttccaataccacaaagcgctgaggatcagacctttgacacatgggtccttgggccacagctctaaatcaaaactataagcagcatttatcccacctttttataactttattataactgtgttatataagtaccattattaaccctgtgctaaaatggagcaatgaagccttggagaaagcaaatgacccccaatagcttaggaattaaccgtcaggtgtgaatcaagtctgcctgacttccaaactcacagtcctgtcctttattgcttctgggagcttcttggtgccttttctgagaagcagagatgacagggtagtatccagaggatggctggcaaaccagagatacttgcctgtcaatgagtagtgggctgttattcgcaatagctaagagagagaatcaacatagatgcttaccagtggatgaaggcataaatacattgtttatattcacagggaatatgtttcaaccctaatgaataactaaatcatcctggcattacttgtaagtgtgagaactcaaatgcagaaagataagtgatgtatgttttctttgtggatgtttaaaacaatgaaagttgactttaaagtagaataaagattgctaaaggtttggaagggcaagttgacttgattggagcatgctacaatatcacatagaagccactagtatgtataatgataatctaaataaatcttatacatgatagtctaatttgagagcatgatataaattaccttttaattttcaaaacaggcccattaattatatgcgtttccctgcctgctttggtccatcaaggctgtagcagatggtttttccaacagcatgtgaggagaagtggcaggctagctttctgggaagatccttctctgtgggtgtggagtctctgaagcactctttccttcatatggagatgcattacagaaccctctcacagaggaggactgtctgagacccctctgctcagaagggaggtcacatgtgttaaaacaatgctgtgatttggaagttgtctgtgaccagcacagaatgtatctttgaactgatagagtatctggaaaataaaatgcagatagaggcaaggattgtcttgctgtgaggttggggcaaatgcaggagcctgatcagggcaggccttgtctgtcttgctgtttcttctataagacgaggcacggagtcttcctcactccaggtgttacttctgagctgattttgaagtgtacagagtttcattctggcactcctgatgttagcgccatcttctgtttgtcacagtcccaatctttagaggaagttttctccagaggaagaaaaacttgaaaattctttttaaaggtcagggagtgattcctgtttttgcaggaagtgctcctgggattgcataggtaaacaaccgtggagtggcagtctcacatcctgggtaccatctctctctctctctctctgggtacctcatcagtgttcttggctagaatctgggcagcagttccccctcctcagtgtggttgactcccctagtctagtaaacagtgcagacattgggggtgcctgatcttccttgctgatagctgagattaaacacaagctcagagatcacatagaataaggaaaattcaggggtgcttgtgacactttttttttttttttccgagacagggtttctctgtgtagcccttgttgtcctggaactcactctgtagaccaggctggcccggaactcagaaatatgcctgcctctgcctcctgagtgctgggattaaaggcgtgcgccaccactgcctggcttacttgtgatactttaaatgataaatgggataaaaacagttcttgggactagcaatcagaaaactccttcaaggtagacctggttgccttatttcttgccttggcctgactttctgcctggaacatggcttcggacactgttttgtagagtcagtgttaaagccacaggcatgtctgtttgagatgaatcttggaactttttaagacttagtaaggtcttgggtccccaatgaccttgtggattcacctgaccctgccaactgcccctgacactgggtacgactgttctcagctcaaagcttcccacactaccatgcccgcaagaactctgcaaaagccttgctttgatttaccatgtcatcacaaatccttgtcttacttcagctaggcaagactcttaactaattggattttctttcctttctgcctctgtgcatggatggttattagagaccagcattgctgagatggcacaactcctggaatcatcaaaggaattctatcatagtcaggagagtatattatttaggtggaaacatgcctaatatagcttagaaagatttttacagtatgagaaaaaattcctaatcttgaaattcagttagtaagatttattccataagtagtctggttagtcaatattttcacatctgccactatgattaaatatttattttgtaagataagtcttcattatatagtttaggccaacctcaagtttttttatttaccttgggatagtcctgaactctgtatcatcctgctgcttcagcttctagacggctataccaccactcttggcacgcgcgggtgcgcatgtgtgtgtgtgtgtgtgtgcgtgcgtgtgtccatgtgtgtactgagaaagggtctctgtttatagtcttgtagccctttggaactctttgtagatcaggctgacctcttaagtgctgggattaaagttatgtaccttcatacttggcttcacaatgggttttttaaagtaaaaataaaactcatgagttttcagtctcacatatattgtgatgtttgatgatgtttgggaaatcagctgtatgaataaattaaatttgttatacagaggaaacatttaatcttctgtgatatatacctaatagaagttatctgcttgttaaaggacatgaaaactacctagattctgggttcttcaaataaatatacctgaactagagttggctaatatatagggatattgctaagtggcagtgtactttcctaacatactcaggggcgtgggttcagttcccataacacaagaaagggaagaaaaagatcaaccaaatcatgaagatggtcagtagatgcacgaaaatatgtttgggttcaagcattttgaagtgacaagttagaggcagcaagagagtgatagaggcagtttctgcctaagagagctgagcgctgctgcgtattcaagctagccattcctttaacaatgaaaatagttaaggaaattaagcaggaagtaccatggacataaagtagcatgaagaatataatagaaaggactagaagccactggaaactgtcctctcaaaaggccatgtccaacatagtagccaagaggtgcatgtggagtactagaaatgaagtttgtgagagttatggaagctgtcaaaatgcacactacatttcaaagacttcatgcagagaacatagtaaaattccctactcattttcataatgattatatgtgcaagttatatttaggttatattgagctgaataaaatatcaaaatgaacatgtgtgtgtgtgtttatatgtgtgtgtgtgtttgtgtgtatgtgtacatttgtgagcacccatgtagaagtgtaaggacaatcttgggtgtaccttgggttttgagatagagtccctccccaggctgcagctcaccaggtagcctaggctggctactcaatgagcccaggcatctgcttgtttctaccttgccagcacatttgttacaagtgcaggctaccacacctgatctatttttaattatttatttttatatggattctggggaccaaactcaggtgcttatgcttgctgggcaagcattttctttttgcctgagatacctgcctagacctcacctgtttgtcatttgactccgtttgtttttgtttttgtttgtttttttttaaaactagaaactaaaatgcatacatggttcacatttgtgacttgcattatatttctcttgaacaatcctgctgtaaatcccatttttggaacagattgtcagagctcctgtttaaaagttaatgaagagagttttactctttcatattaaaaagagagaaagaaagaaaggaaagaagaaaaggaagaaggaagaaggaagagaaggaggaggaggaaaaggaagagaaggaggaggaagaggaagagaaggaggaggaagaggaagatgaagagaaggaggaggaggagggagaggaagaggaggagggagnnnnnnnnnnnnnnnnnnnngagaaaggaatgactttgagagattcttggaaacctgcttcctagggtttttctctacagagcaacctgagtgagcaccactgaagtaagcaggcagttgacagtcgctgttgctcagcgtttctagagtttctcatcacactggcacaggactgaaggcctcctgatgccacctgtaagagttgtgccatccctgacttgcctttctccttcccacccacctatgttagccactgccgagatctttagaaaggccgagttcactgctgtgttttgttcttgggataggcctctgagctaaggatttttttttcaatcctgcatggccacagggctgctgctcattttaggatttacacagatgactcggttagctagctcgccacgtccttcacactctgaaagaaccaagggtgatgagttgccttcttgcttttgttactattctgtcttcattgcctagatcagaagtacatggtagactcttaacatacgtgaagaaacacaacaatctaatatgatgcaactgggaaagaggggacacacacacacacacacacacacacacacacacaatctatttatgaagtataacgtctttataccacagactgtacgttttttcttcttatttaaaaatggcatttggttcaggtgttgctctcctacatggctcaatcaatcactgggaattgtcccaagctcctgcctgtcaatggttcaagaagatacaggaagtagccgggaagtggtggcgcacgcctttaatcccagcacttgggaggcagaggcaggtggatttctgagttcaaggccagcctgggactacagagtgagttccaggacagccaggactgcacagagaaaccctgtctcaaacaaacaaacaaacaaacaaacaaacaaaaagaagatagaggaagtatattgtgcccttaaactgtgagtcacaagatggcttacagacagcagtgtattgttaaatttgctcaaagaagaggttagatgttctagtctttctcttacacacacacagacctatacatacatacatacacatgcacacatgctttgtctgtgggtgtaatgggaccagctactttaagtcctgctgccctgaaatgatgcagtgcacactggtactgtgagccaaatagacaccttctaatgctgtgttttgtcagtgtattttatcacaataggatgtgaagctagggaagtgggtaacggagcttgccacagaagcctgatgacctgatgacctctgaactcccaatggagggagacaaccaactctggaaagttgtcattttgaaatgggatgggatgaatttgccacagacacacagccgcttcacatacatatacacatacataaaataaaattaaaaaactagttttgcagtagttgagtgatgacttaacggtttagttatacatattcattataaaagtcaagcatttatagaaagtgcaagaaaggaagtaaaaaaagctgtctaaagtctttttatgcaggtagaagaaatgaatgctaatttggtgcaggtattttaggtgtttctttatgcctatgtctagtagaaggtgggcttgttggctagttggttggctagtttaggtagacagaaagtccacagtttaaaaattataagaataaaatcatactctatattcacaaaatgttaaaactagtttagcttactttattttaaattttattatttattagtattatttgtgtatgtgtatgcatgtgcttgttagtgagcacacatgcaccattgtgtatatccggaggtcagaggacaatttgtaatagttctcttcttccacccttttggtcctggggatcaaactcaggtcatcagccttggtggtgagctcactgactggctgagccatctcattggctcttgcttcacttaaaaaacccaaaaaacaaagaaacaaaaaacaagattatatgccccagtacaagggaatgccagggccaggaagcaggagtgggtggggagcagggcggggggtggggggcggggggagggtataggggactttcgggatagcatttgaaatgtaaatgaagaaaatatctaataaaaaaacaaacaaaaaacaaagtaagaactttaaataaatagtattagtttaaaaatatttgcttgtgaaagtttacatgaaaattaaggggcaaatggggaagatagcaagagtttatactttgaaatttagcataatgaatctgtatatgaaagttgaagagatgtgtgctcttaagactacattacttctccagctcctggattccagtgtttttattttgtaaaagttacattccctttgttgttgttgttgctaatgcaatttctgtgcattagtttgataactaagtaggttctgtggttgctatggtatctctggttttaaattcttcattttgaatcatcattttgtagatgaatgttattcctctactccagagatcctatgggtatcatattccttgaggtctttaatgtttgagaatgtctacttgtgaactttgtagtcttggctaacaggcccaatgttattcatgtttttaataccttaggtctttcaaaatagttttctggtattttctagtacaacatggtgctgttgagaactagcctgatatttttctgccttacacatttcttgttatttgttttccataccaaaatatcactaaaggtctttttcatttcttaaagctcagtaacgttgccaggatagagatcatagataattattttgaataagtttttttttcaaattgtgttgcatgtctctttcattttaagattcagctcttacataggataatacatgtctgcttctgtttacctacatacgttttgttgcattttctcaagttcattcttttgtcagacacaggagtcacccttctgatcttcgtgctctctccttacctcagactccttgaatacatttttctgtacatgctgttcgtgattgcctcaagcctttacttcacacaaagggtttgcttttagctctgtctgttctatccaggctgcttctaactcatcattagacctgccctgatgatgttttggcctcaatttatttcccaaactcaacaatttctttttccatctcattctgctctgttataatctttgagcctctgcttcagtgattattggtacttgcaatatggttctttacagtgaaagcacttgtaagaagactacttctcttgcaatgcgtgtcttttacttctgtttcaatgcttgtcttcttttacttctgttgcaatgcgtgtcttcttttacttctgttgcaatgcgtgtcttctttttgagctgattcttctgaagccttacacacacttctttctggttccctctattattgtaattattgaccagattgtcttgtaatatgtacagaactctttgtcgtcagagttcttttggatggtttgctcattctttgtgcagttactagttttacttagtgtttgtcttcgtgcagtatggttgggtgcctcttggtactattccttctttaacatcacttatttctgtccattgcagccagtatttatcataggtactttgtgaagcctgaataaggctgagagaagggacaagagtggaattcactgtaactgttacagttattatggactttcattaaatgtcctggcccagcacatattctgctaggcagaagatgtgtctgtttttggaacttggcatatctctctctctctgcagtcctgagagatgacaagtgctggtgatggactctgctgaactatctcaggatttctgttcttcattggttgccacttctctgtttgctgacttcttgtgcctctatttgattctctatagttactctttcaacacttaaatacattttaattttcaggcacactcaagggagaggaagggaggtaggaagagaaggaaggatgagaaagagagagagggagggggagaggggagaggggagaaccactctcacattcttcgggctggctcaccaggagcccccaaaccagggccagctgtactctgtggcccaggcaaggtgcagggcccactctcctgagtgtcacagctggtgagggacagggtcactctcatgaccctggggagagctgtagtgtgtcacagtgtgtcccacagtatacccctttgtccacatttctttatttgcaaatgtttatttcaatgacttgttggtctggtaccaggcctctggtttcacactacactctcatgactctcgtgggagacctggcaatggataagggagaggaggggggtnnnnnnnnnnnnnnnnnnnnatgattacaatgtgagtggaagtcagggggtaacttgcagattgagtcgcttctttctgttttcatgagggttctgaggattggatgattcggatcaccaggcgggtgtatcagttgcctttatccactgaaccccctttccctcttgctggccctgttttttcctttttattattcttttttgtttgtttggttttgtttttcaagacaaagcttgtttatatatattagctgtcctggaattagctccatagaccaggctggcatccaattcacagagatctgcctgccttggtctactgaatgctgggattaaaggcatgtgccaccactgacaggataaaatgtaatgatttatttttatttcatgtgcattagtgtttttcctgcaagtatgtctgtataagatgctggataccctgcaactggaactacagacagttttgaactgccatggctgctgggaattgaacccaggacctctggaagggcagctgatgttcttaacttctgaacatctctccaacccccttgtccctattaaccaaattctaaggaatgtattcacttacattcttttatcattactgcttctgtgggtagggttgggctaaagccgtgcgatcataatccagaatttgttttcttttctaaaaccttgtggattctaagcaaagctctttcatttgtctgttttgttatttgttgtaagtattttgactttccaattttgtttttttttttttctttctttctgaggaatcgaaggccaaatctttgaggtgggaaaattcaatttattgtaagtgatgatacagttgaaatgattagcataattcagtgtcaccattaatctttgacactactattcattctcatgattttcttcagtgacctaaaaatcttttggtagctttcatatacataaagaaagagaaatatagaactgactaaaaatacagcaatctccccttaaaaaacaaaaaccaaaccaaccaaaccaaccaaccaaacaactaagcaaccaacaacaacaaaacaacaacaacaacaacaacaacaacaacaacaacaacgcaacccaccaactttctcaggtaaagtgcagttggaaatcttgtgtcttattgagtaggtagtgagtaggttatggtttaagtctattaatagaaaactgtatccctagtttctgttatcatatggggtagaaattcaaggtggctttcaatctttttccacagcccgcaagcttggtataattccttcccctcgaatgttagtagacatgatctaacaagatgagccccttttcaaggaagatctaaaggccagggagattcagagttctcaagtgaccttggagaggtgtttttcatgagttctaaagccttaaggaggtgaattgttttcaactatgtgtacttggcagaggacactgaaccctgtcttggacagcatgattgaacctggtaacaccatgtggtagagaactcagttgacctgtggccagagcctttcagaactgagccacactgacagatttttaagacactaagtcatggtaatgtagcaacagtaagttaataatctataaatcttaaaaatgtttgtagacttaactgatttgttttaatttagtctgagtatctctgaaaacaaaagctctaatttcttgttctataataatttatttttctcagacaggaggactttgctatcctatttccatacttcttgattgtattttgtcacagttcttcttcttcttctccttcttcttcttcttcttcttcttcttcttcttcttcttcttcttcttcttcttcttcttcttcttcttcttcttcttctcttctcttcttcttctcttcttcttcttcttcttcttcttcttcttcttcttcttcttcttcttcttcttcttcttcttcttcttcttcttctacctgcttcgattcctctgtattagtacttgaggaagaaatctagaatgtttgctgttctaaatcataattgcaacttggaaacatgggtgaaatggattaaaggaatagtagaatatcattctgaaatggattatagaactgatcaacatgaaaattattgtcaaatggtaggcttagtgtgtttttaaattaatctttaaaaagtattaaattttaattaaaaataagattatttacatacattgagaacattgcacaaatagctaaacagcttgtttattttttagaaagtgcataaatgtatgtactatttctagataaagagataggactttatagaactcccatttttaaatctcttacccattcataaacctctttccttcagttaatcactattctgtttatgtcatcttaaactagttttgtctacttttaaaatatgtgctttcttttgttttgggatgatttagctcagcagtgtttgtggaaagcaaatgctaatggctaagctgtagactgttctttcacattgtttcatagactcccatcctgtcaacatgctgtaatctagagctccattgtatttggagccctgtgctcacttctatcacgtagtgtaatatagcttcatttgggacagttgtagattgtgcttctatgaagattctttgcacacatgtggcactttggatgagcatcattccctatccagaagaattactggatcagagaattatattattaagttttataggtagtataatcagatcagacccagcaacagtttctcaaagtttctggttaagtgactctcctaccagtggtgtataagaactgaagttgcttcatcacagaacttatcatcatcatctttgtcgtctttaattcctctaaacggcaaggcatcttattgttcttttatgtgtatttctttcttggtatgtggtgactatctttccatatatttattgaacactattacttctccaactttatgtcataagccattattaggtgatgcgatcaatttttatatattatgatcaagcatttaaagactaaggatgttgctcagtggtggaatacttgctctcatgtagaggactctcagtttgagagtccagcactgctgatagaaaaaaaaaatcaacatttagaaggtatgaaatacgggtggggagatgcctcagttactaaagaacctattgtgtagacacaaggacctgattccagcacccgagtaacaaagacaggcatggtctctatatccctagggacgatgagaatgaggcagatccctgggattgcgggccagcagtccagccatttggcaaacgctgggttcaatgagaggacctgtctcaaaagatagggtggagcataagaccagagacactgaaattaatagaggagaaagtagggaaaagcctcgaagatatgggcacagggggaaaattcctaaacagaacagcaatggcttgtgctgtaagatcaagaattgacaaatgggacctcataaaattgcaaagcttctgtcaggcaaaagacaccgtcaataagacaaaaaggccaccaacagattgggaaaggatttttaccaatcctaaatctgataggggactaatatccaatatttacaaagagctcaagaagctggactccagaaattcaaataaccccattaagaaatggggttcagagctaaacaaggaattctcaactgaggaataccgaatggctgagaagcacctgaaaaaatgttcaacatccttaatcatcagggaaatgcaaatcaaaacaaccctgagattccacctcacaccagtcagaatgactaagatcaaaaattcaggtgacagcagatgctggtgaggatgtggagaaagaggaacactcctccactgctggtgggattgcaagcttgtacaaccactctggaagtcagtctggaggttcctcagaaaattggacataattctactggaagatccagcaatacctctcctgggcatatactcagaaaaagttccaactggtaataagaacacatgctctactatgttcatagcagccttatttataatagccagagctggaaagaacccaatgtccttcaacagaagaatggatacagaaaatgtggtacatttacaaaatggagtactactcagccattaaaaacaatggatttatgaaattcttggacaaatggatgtatctggaggatatcatccttagtgaggtaacccaatcacaagtcattagatatgtactcactgataagtggatattagcccagaaacatagaacacccaagatacaatttgcaaaatacaagaaaatcaagaagagggaagaccaattggtggatacttcattcctccttagaatagggaacaaaatacccatgaaaggagttacagagacaaagtttggtgttaagatgaaaggatggactatccagagactaccccacctggggatccatcccataatcagccaccaaacccagacactattgcatatgccagaaagattttgctgaagggaccctgttatagctgtctcatatgaggctataccagtgcctggcaaatacagaagtggatgctcacagtcatctattggatggaacacagcgcccccaatggagaaggtagagaaagctcccaaggagctgaaggggcctgcaaccctataggtggaacaacaatatgaactaaccagtacctccagagctcatatctctagctgcatatgtagcagaagatggcctagttggccatcactggaagagagaccccttggtcttgcaaactttatatgccccagtataggggaatgccagggccaagaagcaggagtgggtgtgtaggggagcaggacggaggagggtatagggaacttttgagatagcatttgaaatgtaaataaagaaaatatctaataaaaaaaaagataggatggaagatcatcaaagagacacctaaagtcaacctatggcctccatatgtacatgcacacacatgcaggtgcgcgcgcgcacgtgcacacacatgcacacgcacacgcacacgcacacgcacacgcacacgcgcacacacacacacaaacacacactaaaaagttttaaatagtatggcatgcaatagaattgaggagatagtagttataatgttaggtattttttagaggactttatttcagttttatatgtatatagacataccaattttaatcaattatgtaaatttgcttgttacatctcttaatacgaatggtggcagaaaggtttacaaaaccctgttgtgtattacatacccagagcccctgtaacttgagtaagacataaaagctaagactgtctcatttagtgcagtccttggacagaagcagctgagactacaaacatgatcggtcatcagcactggaaactgagataggacataggaagagaggcacagagcctgtgaacccacagagggagacaccctgccagtgtctgccgtgaagaccccatgtagacaaccccaagtatacagtcattcctggctcttcaaactttctgggaagagaaaggtggccgtagaccctcatgtgtcagaagctgcccatggtgttgaccagtttggggaacctctcctgtggctggcgttttcttccccaaagggagaaagtctgtggaagaagctttctgagtgtgcgaatttattttagaacaattccacccatttcttatacttcttactatcccgcagcagtgaagtgcaggagaagctgtttaattaagggccattatctacatttctatacagctagaacaggaggcaagcatgggagtaagcttgtttccaatccctctctgtgcggattatagctccttaaccctctttctttcaatctcctacttcagttgaactcctgatgtgaggtgcttgcatttctcaattatatattactttggcatctttgtctcagagaccaactgtatttgaacatttgcatgtactttaaggttcatttctgaaggcttcataaatacatagccttctaattaaatgctagtgttataaatattaactgtgtacaattaaggaatattcagaatcaatctatgatttttcccctttttaaaaaattctccatgttgaaggtaaaatttatcctatacaagctttagggagaataaatgtataatttgaataagtacttccctgaatagcagtattgcttaatatagttaattataggactttaaatactcgtgagttccattgtgcaaatctgtgaatgtaataaaacacttttgacatgctaatcaaataaaacaatataagatttaattatccactttcaaagggttttatgtactagattgtctctgttgttagacgcctttaggtaatttaggaaagttagaatcatcttaaatattttattttgttcttaaagtgaaaaacaacatttttatagactcaccgctcccacctgctcagaggagaggcaggggaatggggaaaggattgtgggagggggttacctggaggggggagtgagtgggatataaagtgagtaagtaaagcagacaagcaagcaagcaagcaagcaagcaagcaaacaaacaaacaaaacctttcaggacaagcactgtaaaaagaaatttaaatcatcaaaacctgtacaactcagataaaatgtctattgacattttgctgtgcatttgtgtgaatataccattatatatgcacagaaacaagcatatacctggttgcacatgaacagccagacagcgtgcgatgtaataatctgttagttatccctgagggccagatgttgttttctgtcccccccacctttttttttttggtttccatgtctttcaataaatacgtgcacaatgcctttgaatcgctgatgacatcacattctggtatgtgagacgcactcatttatgtactctcttgtcaaagtgtcaaatggcacctttacccttctctgtcttttgttaacatcgttgtaaattagccatttgcctttgcacaactgtctcaagacaaattattcaaagtctggtttctgagccaaagggtaaataatggtggatgtcaattaacaagttgctctcagacctctcttgtagcagagcaatggagttccggctaccccagttctccagtatagattttgtctttcttacaccgtgggaaaggatcagagtatatgccatatctcaaaattgcttctctttgattataaataaaggttttcatatttgtaagtgtttatcgactgttagtattttcatctttggtcattgtcttagggtttcattgctacaaagtgacactatgaccaaggcaacttttgtaaaggacaacatttaaatagggctggcttactgtttcagaggttcagtccactatcatcatggcaggaagtatggatgcatgaaagtagacatgttgctggagaaggagctgagttctatatcttgatccaaggcagccagtgggaaggtatcttccacactaggaggaccttgagtacaggacctcaaagtttacccccacagagacacatttcttccaacaaggctacacctattccaatgagaacacacctcctaaaagtgtcactccctgtgggccaagcagtcaaacacatgtcaagggggagccaaacctattcaaaccaccacagtcagttacttcaaaaatttcattggaatttttgttgttcatcagagttctatgaataataagatactgtcatttgaatcccattttttgtttgactattacttatttttaaaactatttttactcctgtgaaaatttcacaaccatgtgttttgattttgttcaccctacctcaactatttcccttaactccttacatcttgatccccatctgcttatccttaaacttcgtgtctactttaaaatacgtactaactcatcaactccaatctgtgctgaccacatctttctgagtgtagagccatcaactggcacatggccaacatactaggaactatatccttaaagaagactggctttccctcccctagaattgccagtagctctttagttaggggtggggactcatgagcctcttccccctccatgcttgaatgttgattggcttaatcttgttcagatcttgtgtaggcaacaagagctgccatgacctcaccagtagtggtcctgacatgttcagaatatactgatttgttcctgttctgcctggcttctagctcttacaacctattcaccccttcttccatgttgtttccttggctttcatgagaggtatgttatggatgttccatttgtggctggcactctgtagtcatttgcctctgcaccttgacaagttctatgttaactgctgtcttctgcacaaaagccaaaaccaaaaataacaacaacaagaacaacaacaacaagaacaacaacaaaaacaacaacaacaaaaacaacaacaacaaagaaatctgctctaactagggcctaaaaatgcaccattcctggatcagaactggtctgtccgctgggtctccagcaagtgttggagctgctgggagatgtttgttgtttgacttttagttgttcctgtagtgcttttaaaatttaaataaatgccacttgctaatttttccagaggaaaaaattttatttgtttttacttgtgtgatgtgtctctgcatgcatgtattgcacatgtttatgcatgtgcccatggaggccagagaagggtatgatgtcttctggaggtgcgttaaggtcattgcaagccacctgatatgagagctaagaaccaaatttggaccctctgtaggatcagcaagtgctctaagttgccaagtcttttctccagaccccaccaccaccactaccaccaccaccattattgttttctatttgaaataaaaagtaaaaagattcttgacttctgtagattgtatcctgggtattctgtatttttttggctaatatctgcttcttagtgagtacataccattgcagatccttttgggtctgagttacctcactcaggatggtattttctagttccatccatttgcctgcaaaactcatgacatcctcattcttaatagctgagtagtattgcattgtgttaatgagccacattttctgtatccatttttctgttgtgggacatctgggtttcccatttctggctatcacagataagcctgctatgaacatagtggagcccatgcccctgtggcatggtggggcatgttttgggtaatgcacaagagtggtatagatgagtcttcaggtagatctatttccaattttctgaggaacctctagattgatttccaaagtggttgtactactttgcaatcccaccagcaatggaggagtgttcttctttctccatgtacatatgctgtcacctgaattttcgatcttagccattctgattggtataaggggaatctcagggtcatttttatttgcatttccttgatcgctaaggactttgaacatttttttaagtgtttctcggccattcgaaattcctctgttgtgaattctctgttcagctctatacctcattttttgattgggttgtttggttttttggaggttagcttcttgagttctttatatattttggatattagccctctatcatatgtgggagtaaatgggagttcttcccatttggaagggagaagaaagcaatcatggggaagcagagggaagcaggaaccttagtgggagaggagaggagaaggggaaaggggaaacatgatcaggtattgggggtggggtggggtgagggggacaggaatgaaggccaagggccagcagagtgaatggaaatatgcaaccttgggaggtgggaggtgggaggtgggaggtgaggtgatgctctagaatgtactagagacctgtaaggtgagaggctctcaggactcaaagggagggaccttagatgaggtgaaatgcccaacagtagggaaggggaacttttagaattcatctccagtagaaagacaggacatcaagtaaagggatggggttgctatcccatagtcaaaaactctgacccagaattgttcctgtctaaaaggacttcagggacaaaaatggagaagagactgagggaaaggaggtccagcgactggcccaacttgggatctagctcatgggaaggctctgaggcctgacactattactgatggtatggtgtgcttacaaacaggagtcaagcatggctgccttctgaaaggctcaacaagcagctgaaagagccagatgcagatacttacatccagccaatggacagaagccagaaaccccagtggttgaattagggaaaggctggaaaaagctgaggaggagggcagccccataggaagaccagcagtctcaactaacctggatcacctgagatctctcagacactgagctaccaaccaggcaacatacactagctgatatggggccctggacacatttacagcagatggctgcctgttctggcctcagaaagagaagatgtgtttaacccttgagagacttgaggccccagagagtagggaggcccggcagggtagtggtttggaagttggttggggtgaaggtggtggggtttgtggggacatcctcttggagacagggggaggaggaatgggattaggaactgttagagggcagaccaggagggggataatgactggactgtaaaaaaaatttaaagataaatattttttaaaaagatataaaatcagagaaataagtatttgaataacccaagggtaaacttacatagtgtacaaaaatcattgtgcctacattgctcccttttttttctaataatgtactctttgtaaataataaaaatctacatacagtagaagtacttttgaaacaattgtgaaaactgttaagagttacattcataatgtccagtacgtttatatttgacaacttaaagaaagtatcctattatctaaaaaaaaaggtaagaaggctataaatgtattatttgtagttcaatattttgtgttgtatgtgagctaactccatcaggctatgttgaaggaatctgtatattttcttattgtagtcgtcagtttactttttggcataataatgtttggcctacttggggttatatatatatatatatatatatatatatacacacatatatatatatatactttttattaggtattttcctcatttacatttccaatgctatcccataagtcccccataccccccccccctctacccatccactcccactttttggccctggcattctcctgtactggggcataaaaagtttgcaagtccaatgggcctctctttccagtgatggccgactaggccatcttttgatacatatgcagctagagtcaagagctctggggtactggtgttgttccacctatagggttgcagacccctttagctccttgggtactttctctagctcctccattgggggccctgtgttccatctaataactgactgtgagcatccacttctgtgtttgccaggccctggcatagcctcacaagagatagctatatcagggtcctttcagcaaaatcttgctggtgtatgcaatggtgtcagtgtttggaggctgactatgggatggatccctggatgtggcagtctctagatggtccatccttttgtctcagctccaaactttgtaactccttcaattggtgttttgttcccaattctaagaaggggcaaagtgtccacactttggtctttgttcttgttgagtgtcatgtcatgtgttttgcaaattatatcttgtatcatgggtattctaagtttctgggctaatatccacttatcagtgagtacatctcatgtgagttcttttgtgattgggttacctcactcagggtgatgccctccaggtccatccatttgcctaggaatttcataaattcattccttttaatagctgagtagtactccattatgtaaatgtaccacattttctgtatctattcctctgttgaggggcatctgggttctttccagcttctggctattataaataaggctactatgaacatagtggaacatgtgtccttcttactggttgggacatcttctggatatatgccgaggagaggtattgcgggattgggattatatttaataagatgaaagagaaaatgcaagtgttgcttttaccctgcttgctagtaagttatcataatgcatggatatttaacctattgctgattttaaaatgtctcaatttatatgattcccctaatatttgaactagtttataagacatcactcctgctgttaaccaaaaagtccaagacgcagtgactcacgaggttaatgtgttgtcgtttttagttttggtggtgtttaaaattgaattcagggtcttgtgtgtgctaagtaagaactccaccgtcgagacacagccctgtaccttcctgcttttatgtaaaaacaatttatttctgtagcttttatactatcttcagtatagtgagatagctatcactttggtgttacttttcaagttacatgtccacttttacacactgacccaaattgtgaagtcatttggtcaagttaacacaagtcctggactgctattcaactggggctgtatgagatttatgtttgttaatggaaaattggcaagttcttagtactagataatcttattaaagaaaagaagtattttcttcatggattctagtgttcttttatgggttttaatagctttatatgctcttcatgtagccttgaatatttttaaagccttttactaatatttaaatattaattgtactaatatttggttcttaaataatgtaatcttctttatagtatttaaattttaatcatctgcacataaggtattgattttgtttatttcttttatattccagaagcattagggaacactcgaggagtgtgtatcttatctttcagttgattttaacttttctaaagtttcaccaaatgaagtccagggcagaagaaacaacctttttattgtagactttgatataagaacttaagagcatgtagccaaagtgtgacagtgtgtatggatcatgatttgtgcactgagggcagactacggtctggcttctacccctgaaatatgttaagtgtgctaacatgtaggcatgcttgtctagtgttctgagttatcatttagcactccattggttaatttctaatcacaaatatttgtgaactctctgtactacatagacaggagaaaggctgtattttcagttgagcttgatgtatagttacttcatctgccaggggtgtgtgaagaaaacacaggtacacttgaactgtatttaataaatggtcaagaatttgtgaattcaggaagtgctaacttttttttttttttttttttttttgttttgcagtcacccaaataaaatttgtcgtgagcaattctattgcctccctggaggttttactaagtcaaacccttcaccccataagtaggtgttgggtgatcacctgggaaactgtgtgaaccaacctcagttggggaaccttacattggttggttaagttaaagcagatcctgatgtacgtttagtggaacaactactttcagtctttggctagatcagcctaaccttgaggctcctttcagtgccaaggtactttttcagggtcattttttttttatttaaaagatctttcggatatttttactatagcttgcaactaggataattccacataaaacaaatcccatttcacatttcctttccctttatattttccttttccccttcttctctgtatatattccttttgcagagaaacattttattacagctgtttattttcttttacaaccattgtgtagcttttgtaatcaaaatgcagaaacaaactagaaccagaagaattctctacatagactatctactaggtaagtacacacgtatataactacacagaaaaaacattaggaatacatgacatagatttttgaaaaatacccctttctcacaaaactgcctgcgaactgcttggtaattagagtcttaaaatgttacattagacaagctatgcctgcaaggataaaccatgcagtcagttatcacacagtgcatctgttgttcttggttgaccatcagcaaagagcaaagaatacataggaggctcacttaaagttgaatttcagataaagcattgttacaatagtatggagtgtcctccttggccttatgtgttgtgtgcttatcccccagagggtggcactatctcaagaagttcttgacatttcaggagctgggagtaggtgaaggaactgggtcatgcttttgaaggctgtacctagtcccctgtcacctccctttcttttctcatgaagggaatagcttcctgtaatcctttgggtttttctatgtctgcccagttctcaaataactacacagaaactatatttatttataaatgccattggccttataggaggcattgttccccactagctcataactcagttattctgctaatactcatctaagtctgccatgtggcttgttacctctcctcagtatcacatgtccaacttcctctgagtctgagtggcaaatcctcctgcacatcactcttttccagagttcctatctctttgctccaaatcctgcctattctctcctgctttgctattggccatccaactctttattgacaggtgaggcttttacgtactggacaagagattatttctacatttccccctcttagtcaaataagtggctttttctctaacactaattaacagtacataatatgaataattatgaaaattatcaggtaagaattctatgcacaatgtctggtgcatttgtatttggcaactttggagaagttattctattctcaaccatggagaattcaaagttctgtacataatttactttgtatcataacttgtatttaccaacctaaaaatgtcttcttagatcttaaattattattttaaatataaaacaacttaagcttcattgtgagactataactatctagtcttcaacccacaagagacctgagaagtataaatattacttgagtaaactgggagtacagagcaaacaccttccaaaattatagaaatggcagaagtttctggctacttgaattgtcacccaaggttcttctgtgtcattggagcatcatctttggccttctggcccagtatatccaacagacttttctgtgaagcaggaattatgaagtacttgcccatcttgtccttaaaaagcttggcagttgacttactccatgtcctgcttgtccacagcttagaaagcatgatgtctgtacttgaggtaagggcatgttcttccccagtggctagcttgccacatttgtagcactccatatggatgttactcaattctcattgacgtggagtgggggtgtgtggatttagatttttcagaatctactttaataagggttcttaaacacttcaacctcccttctaacctactgaccagaggtaggagagaaagatggttaataggaccagggtgatattgaacctctttagaagtagttctttgagggcaattccaatcttcgttgtcaggatagcaatagtcaaaaacattaaatgggaatcagtagcagcaatccagtccaagtgtcaaacactgaatacggatcagtagcagaggcttgatccagaagaaaccatgaggttctactgaattgacatgagtccttggaagtgacaagaagcagcaggaataccacttgagaagttcttttatgagtttctctctatgaagttgtgattaaacaaagatcagtaaagaccagcaaaatgctgcaaggtataccattgcaagagcatcatcagcaaagaccagtgaaacattgcaaggtgaaccaatgtaaagcatcattcactgtctatcggattcttgtgcttatactctttccacacatcacgcgtcctctcatgtgtctacctcgtcccatgtgtcaacttcagcaaaaccatcctctcacaggtctgcttcagcaaaacatcctctcataagacagcttacagagaaataccacaggacataactgagtctccaaagacaccagaaatttccacttcaggggtggtgccagcagctgatatgtctcactgtcaagaaatgactttattaataaaagattttcaaatgccatattctgtagatctctgaggtttttggagaccatctctctatctatagtatgtctgattaagcaaaaattacttgtttctgtttactatctgtttaacttagaaagcatggttttagaattacgtagactattatctaacatgaccaatttagtcattgattgactacatactaacttggatttcttaattatcctaaatagtttgtaacagtagctttcaaggactagaacttttattgtatttttaaatgagttgcataggtcaaataccctgaacaagagttgaaacatacagtatgttgtagtaaatatcttaattttgtatcaatatagagaatctttacaagttaaattatttggcttgttaatgatgtttagtttaaaagtagattcaataatctacccttttatcctatcattctataactctcctttttctttttatcccttctcaaaccttctccccaacattagataggagagaaagaaggggagagaaaaaaaagaaatagagatattcctgaatctaacatcctttactttaggaccaagaccattaaagacttgcatccaacccccataaaatgatgacaaacatctatcacccactgaactactgaaaactacccactccctctcaggtggcagctcaggccactgagatcacatatattcctccctcaacccctgtaacatggcagacatccagacagttccagtgacggacttccacttgacctttggtggtcacttgggccacaggtattggcacagacttcaactgcagagggaccagggacccagccatggcctcagtatggcctcaggtggttacacagcctcctcatacctgttcctcatcacagttgagtctctggttctactttctgcacattgcataaccccctaggctttactttctctcctatgtcttcactgcaaccccatctttcccatctctccatcacaatttgtccaccatagaggtgactgcggcagacgcttaaatgtctttcttggagtcttctggccttcagggtggaggtgggtgcttatcacttgtattttttatcttttggggagccaaaacatggtcctaacttcagttgataagcccatagttatgggtaagttttactatgagaggaggcggcaaagcttgtgaaatgaggaaactatgagatgaatacctaagtccctggaaggcacagacaatctctttttacttactgtggctacagcccttccctctgttcctcaggattgcactttgtctttcaaagagttttatcattgtaatttactgctctatacgccacatttatgaagtacctgatatgtaaataggtctattactatggtcaacacaaaatgacaatgtattgtgatttctccattggtagacacagtcaaccacatggttgtatctgtcctggacatgttcagacttgtcctcttgccaggactaccaatacactatggcaatacactatctacatagtgcttatatctttatagtcatctagacatgatttatgtcaacagctctgtgtgtgtgtgtggggggggggggaatgtggtatccacataaaggatttggacaactttggtgtctgaggatcttagagccaattccagaagtggagtatctgttgaaggatgaagagatagacactcatggcgaataaacaaatctgacttgtctatttttactacatctctgttttgtaatgatgaaccaatgcaataatgctcacccccctctcccccccaaaaagagcatgatatttgaagttctgtgggataacttaagcatcaagaacattagcagatttttttattttaaaatagtttttcactactaattgaaaactttcaggaaaagagctgttggttagcaagctgaaaagttgctgccatccatgattctctggtatagcctctatatgcataatggaagcaaacacgtaaacaaaacaaaacaaaacaaaacacccccaccagaatgacaagctcttctaaagtctattaaatataaagaggaaaaaattccaaatatttacaaatattaagtctttagccaaacagctcactgtgtttgtttttctctatctgacagctttgtccctttggcattgttaatccctgattttaaaaaaaattatctctctagaagcatacatggggaagacattgggtttgcctactgtttatgaaaactgtccctttttttgtgatccatctgaaaactgcacaaggcaagctgcttttaatttcaaagaatgatcctctgatgttgctgttttgtgggaattttatggctgtaaaaataatcacttcctacttctgtttgcaagttttaagcgttctcagattgctcacaagcctgggatcctattgggtatgtctcctttccggtgcaaaggggacattggaaggcattaaaagctagccggaattaagactgtggagatgagtgggcatgtaatgtcagtgtgacagaccccttacgaagctgtgaagatgtgccacaactttgcacttgaggagtgatgtcttaggcccgcctgtctttaagaggacaggcaattcatttttacctccttggctgcttaggttatcagaatctacaaggtgtaagtaaaaaacgggcaagcgttaccaaaagggtacttaaaacttggcagtgcttcagtccaacgaaatgacatggaataaggcaggtaaggtaccagtgcctcaatttacctttctgcaaaacggaagtaacagttccacagggctgttgtgaggatcgttactagggcttggctggtagcactccatgggtggccagtgatgactgtattcagttcttatctttccatctctctgctaggtaccttgggatcaccaggcccctcacgtaccccgtgaggcagaatgggaaatgtatggccaaaatgattctgtcggtctggcttctctctgcctccatcaccttacctcctctcttcggatgggctcagaatgtgaacgatgacaaagtgtgcttgatcagccaggattttggctacacgatctactccaccgcagtggcgttttatatccccatgtcggtcatgctgttcatgtactatcagatttacaaggccgccaggaagagcgcagccaaacacaagttctcaggcttcccacgcgtgcagccggagagcgtcatctccctgaatggcgtggtgaaactccagaaggaggtggaagagtgtgcgaacctttcgagactgctcaaacacgaaaggaaaaacatttccatcttcaagagggaacagaaagcagccactaccttggggatcatcgtgggagccttcacggtgtgctggctgccgtttttcctcttgtccacagcaaggccctttatctgtggcacctcctgtagctgcatcccgctgtgggtggagaggacatgtctgtggctgggctatgcaaactctctcattaacccttttatatatgccttcttcaaccgggacctgaggaccacctatcgtagcctactccagtgccagtaccggaatatcaaccggaagctctctgctgcaggcatgcacgaagccctgaaacttgctgagaggcctgagagaagcgagtttgtgctgtaaggtcatttatcgctaccatccttttatccccttccctctttcatgacgcttcttgaatgttggagaaagccccctgcatcagtggctagctttattattattattattattattattatcatcatcatcaaccagacatcatcaggtgtaaattcagaatactttctttccctcaagataagttttaaagaacccacaagacaggttggtatttgaatgggaagagaagactggtctgctgataaatttatttcatatgcccagtgacacgagaggtgaagttctccatttctttcatcttaaataacatctcaatatgtccatctgtgaagctgagttcatatgacatcaccattttaattgcttttgtacctccattttcatgaaacatatttggtgacctcatagttcctagagaaatgactctttagggggaaggaagcagatgtgattttttttttttggcatggaatctccgtgtatacaggagatgacaagcagggacaaggctctgactgctattgagctgtcaagaagtgcttcctgtcatggtagccatgaactgatggctgctggagttgtttagtttttgatgttgcctgggacaggctcccaacactccagggggcaatgggaattgagatttgaaaatgtactacaaatggtcaatggtgatgtggacatgggagcctctcaagtaactcatatattactaaatttgatatcacagaggagggaggcaagatggtcgggtggcaagcaggtaaaatgaagtcatttttaaagaaaaaaaaattatgtagaggagatttgacagttggaaggagagttaggatgaaatcctagaagaccctggtggaggagatgttcctgggcaccgatgagggagcagagagatgaactgagagaggagtgagggctctgtctccaagggaccttccctgccagagtgacattgccctacacttatgtcacaactatgtctagataccgcataacctcaatcctaggaccacatgtcttccaaatgctggagtatgcttgtcttagcacgggaagttgttagagcatagccactctggttcttgagctgggtgtagcttctgttgtgtatactcgttgcacacatgcaatcattcacaatacacaaggcagcatttagaaagaagcatgtaacatctggctctggaatactcattaccagcaatccccaaagcctttcaaaatgtacaggatcccacttagtgaatatttgctcactcctcacccctcaactttgaaatttttagggaaggagttataacttaaatttctatctccataatctactcctgtgcctggcattcatagaatattaatggtcatggccatagctaccaggctacccagttctcaggaaattaacttgtgactccgggtaactggcacaagataattgacttatgatcacatagtcacaggatggatcatccagtagatgtacccatgtacccataatcatcacagaactctacttgttggttgagtttcgtctgagatagtgaagagaagagctaccacatggatgacctaggaatagtggacaccagcttgctaacaagacatctaggatgtcttctttactctaagtgaactgagattgctagatatgctgtacagtaggagggcctcatccaatcagaatcccaggaaattctcagatacaggaaataaagccgggtcagtgataagagttataggacttggtctgggcggttttgaggcataagacagttatactgatgacagctgcagattttagatcaaatagctttgcatcagtaagtaggagaaagcaaggtatttgatagataacctattttgtctgcatactgttgtatcccctggaaacagctatttcttaagacaaatagctaggttattctgactggcatcaggattgtttaggcagagaggaaagtgtgttggttttatttcttaggagtaacacagtgcagaaagtgtttgagcaaagtatttggaaatggtgtgaagggcagagaagagttcgaggcaagtggtaagaggtcccatttggcagccagtgtgcaaattaggtgagtaaagatgatgccctggtcatctctctatttacaggcctcattggttcaccttcaggataatttcactgattaggtattaaattcacagataattaaggtataagaatagtattttttttaaagtaacatgagcaggttttcctgtttgaaataatagcccacattaatggaggattcattctcagacactccactgagaaccactgaaccttcaaaaccgtgtgatggggtagctttttccattccattttgaagatgataaaacaagaacttggcgagatcaagtcatttccccatggtccttcagatgagattgatagagttggatttcagcccaggaagcctgtgttcagaagtgcttttagcttcatgctaccgtgcccttcataaaaataaatcagctcaaataaagcacaaggattcttgcctgtctatcctcagctaatgctgaggcttgggtgctgtttcctgttagttctagacagggtcagctgacttatgtggcaagggaccaaacagcagtattttgagcttttggaaaccatatggctctcctgaaactgttcatctccgccattgtcatccacttaagcaaacaagaggacatgggtatgtaccaacaaaactaatttacaaaagagatggccagccagattaggcccccaggtgatagtctgctgtcccttgatttaagagagaattatggtatctaattacatatctctcagtttgaaattataaccatgcaggataagcaattcagttaagattgttggcttaaaaatacccaacaactttaggaagtatttactgtcaggactatcgtatagagtttacttggaggccattttagaactttataccatggggttttgttatcagtcccaatattagcagattcatatttggtttatttatatgactatcatacattatgctggattcataaaatacaacatcattcttgctgttgttcatgtatttctacacaaaaagtatatatgcatacttttgtgatctgaacatttgtgttttcccccaaatttgtttgttgaaatatagactctaatgcagcagtatgaaaatgtgggaactctatggggtgactaggtcatgagggcagagctctcatgaatgggatgggagcccttataaattgagtagaggaactggtttatgaaagagacagagcacctcaccagataccaagttaaaccaatcatggactttctagtctctcaacataaagaacatgcccataaatgtccataaaatgatattttcattacattggcctgaatctgccacagcatgtggttactcagctttttctgtaaggatgaaaaatcacacgtaggaagccatgtccatcaaaggagaaggaaatgtatctagtgcttatactagtcagagatgacttcgtggaaggagcatccttgaagctcgtcaatgcagttataactaacagtaaacagaggaaacatttatgtagagccatcaacttaggagcttatgcaaagggtagactaagatctagactctagagggagaaaacagttggagatcagagtagatatgacatggaccgtgttactaatgatttatgccagcctccaagaatttggactttaagtataggcaacaggttctgaattgagaggaatttttgcttcttctcgtaaagatggttgacaatgtctggagatactttctgttgtcatagctggagtgtgtctggatgttaactgccaactacatctggcataggtcagggaggctgtcagctaccctacaatgcacacaaagcatcccacagaaaagacttacctacctaacccacaaggtgagaggtttggaaactactgtggacgggaatgagtcatctatatcttctgtatctagtggatacagaatatttctgaatagggaacactgattcagaggcactgaagaatcagaaggctggagagtttcttcactggtatttctagaaataccggaaggctttctgtgtatgagatatagcaccaggcatggcagggatggaaagagaattgtgtaacagtctttatttccggaagctcacactcttgtgggtttaggtcttgttgaggttagtgatactttatcattcaaccggagtaagaacctacatggtctatagggcacagttacattcaagcaaacactaattggaaagctgctaattggcttgatttgacatatgttgctttttgaagcctcatgctttgctcacttgctctttgatatgattaggttgggtgacatttagggttatactcacccagtctgagtgataacgtaatcagtcactggtcattagtgacaaagacatccaattcacagctcagaataaaggagaaaaccttagactcctcctactttcccacactccctactttcccacattccctcacacatctggtggccactctatggactctgggaaactccatataacttcttcagcccgtttcttcacatccagctgtttgggttcctctgtgtgtgtgtgtgtgtgtgtgtgtgtgtgtgtgtgtgtgtgtgtgtgtgtgtgtgtatgtttgcttcttgctcacttttcttggctcccttagttttcttctacacctcaatttcccttttttcttttctgtgtgagcaatctagactatatgttgttcgtttcaaatatttacccattccttcccattttcttaaccagcatgactggagcctcaggagtccagaaggcactggagaatttaccttggggtaacggagtgaatacagggataaaagctgtgaattctgttgcactggtaattttaattcactactattcattgtaagcctttcactattccccaagtgtttcaataaaggaagtaacaaaatgtaaccatgtgacacagtcaagggtactttctttctctttaattgaatgattttactcatagacttgaactgccacaaatagtttctatcatgccatgagaacttgttctttgacatcacttatgaatagcactaaaaagcagtttctaaaatactttgctataaaagaataccatgggattgttttgaagcagctcttcctttctgtctccctacctctccttggtggctgcattgtctctctctttaaagaacctcttataatccttgtcaattgcagtggttcttagcactgactcctagcagaataaccttgggtttctgccatgaattctgtcaatttgctgctctgggctttaggctgcagctttggaattcaacctgattgcatgcttcctttgtggaaagggataatttaaaggaaatgaagtgaggtacatcccaggggaaactgggaaggaacatcaagccccctgcaatcctaggcgtctgtgatgggtctctgccttaatggcagaagcaaacaaagagcttgctagtccctgggcattttaaagtctctcacaggattttttcttcttcatcattaattgcctgaagttcaagttcagtgcttctcctttattacatcatcaactagtaatgacaataacttctttgcttcatgctttacagttgcccagagttttgccttgaggtatctcaaagtaggaaggacattgttctatgcagtattttatacaatgctgatgatcaaagccagggccctcagaaatgctacaaactttcctagtgagccccaacccttgctcttctacctctttcttcttttttttttgttttttcatttttcccttagttggtaataaatacaggtagcacaatgtaaagttaaatagtacagaaatgtacacaataaaaaaataaggcttgggggcattctttgaaagataatttacgtggtaaatcatgaaagaagcgcttttataagagatgtagaagacatagcatatgggttgctcagtgctgaaggatagtatagtctggtaacagttgctccatctatggatggtggtgggcaagggatctgggacatgtctttagtaatatcaggatgttgggtagattggggttagctcagggatctaggtgtgattttgacaagagtgataccagattgtactggccacaatggatggagaatgtactaacagcagaaaggatttgtgttatgagactaatgttagaggtgaggtctgtgacttgggagttgagggggagaagctatactaggaaggtgtcaatgacactaggagagaggctaaagatgtctgagcaccctggaacctggaatcatcactgtggctagcaggtgtgtgataaggaaagatggactctggaggtgatgttggagtggagccaggaggaactcagtagagtttaggaaccagtgggagcaaaactgagtaaaaaggatgctaggtgtggtccttccactgggctagaagaaccaaaggtcccaggctagaaatgtctctggagcatcatttgttgaggatatatcttatttccagtctccattccaacaagactgtgggactaggacttgaaatacagcaactgttcacatgaactattgtgtgaggttgagagtcaaagctggagattttgtctcatgaagaaatggagtctatcagcaggaaaattcagtcactgcctcaccctatatgaagtatggggctgagaggagagcttccgataaagggatttggatatagggacaccttacgtggggcagggaggctaaggtggaaacatagtcctgggccagtgactgcttatcccagttcctaaacatagtgctcctgtggcaagtcagggtctgtgagagctgcattgtgggagtgttgttctgtgttaggagaatggatactgcctcagctgatgtttaaacatctctatgacccagagcactgtctcagctgttgcttaaacttctctatgacacagagcacttctgtgagtctagaagacaggccttgagggaagcaggattctgacttctgtgtaggtcaatcactagaccatatctttctaagtttgaaatggtgatgattctcagtggaagtaatacaattttatgtgtgtgtgtgtgtgtgtgtgnnnnnnnnnnnnnnnnnnnnnnnnnnnnnnnnnnnnnnnnnnnnnnnnnnnnnnnnnnnnnnnnnnnnnnnnnnnnnnnnnnnnnnnnnnnnnnnnnnnnnnnnnnnnnnnnnnnnnnnnnnnnnnnnnnnnnnnnnnnnnnnnnnnnnnnnnnnnnnnnnnnnnnnnnnnnnnnnnnnnnnnnnnnnnnnnnnnnnnnnnnnnnnnnnnnnnnnnnnnnnnnnnnnnnnnnnnnnnnnnnnnnnnnnnnnnnnnnnnnnnnnnnnnctctctctctctctctctctctctctctttcatgtgtgtgtgtgtgaggtgtgatccactgcatttagtgttgctttcttgagcatgggtgagggtttgtttacctgagaaagctatacaactgaggaatatgacttccctctccccagtagccacttaacctcatgagcccctcctcaactcttgacgaccacttctacaagttcatgaatgtaatatccatgccatgtccagcggacagtgttttgtagcccattttcccatcttcctgctgttataccccatctcttctctcttcctcagtgctctctgggcttggcaagagcgattgtaggtttgttgctgaaggttgagaattcagtgatcagttattcccagtactttgactgattgtgattgcttaatcattttctaccagaaacaaaaaaaacatctctgaccctggctgacagtagcactcatctataggtgtaaacatgaatatttaaaaggcagtttgaaaccatgtccatttagcaaagtaataatagtggctagatctatgactgaccaagccatccgtctttgaacattttagagtatgtgacataaattccctcctaaagagcaaatccaaccagaaggctggttaccccagaaccatcatgggcacattggtcactgtagtcactgtagagtgaaggattcataactagatacgactattgatttttctttaccggcacactgtgcagcatcttctggcagtatgaaagctagccatcagggaagaagtttttaggttagttcctgctttatttcatacaaagtatgatgtctttagtgcagtcttattatctaatgttggaaagcaacctccaaaatgacaatagtctgtattgttttggtgcctcttaagttccctggtcaaaaatccacagggatgtatcctatgcctcgcactgggttggcttttcatttaacaacttacatcttcttagaacagttatttccatccatacaggtacctttcttcaaatcttttttaaaattgtattttaattagtctacaaaataggttttctgtttnnnnnnnnnnnnnnnnnnnnnnnnnnnnnnnnnnnnnnnnnnnnnntactggaattattcttttaacagtcattattttcaagtagaaaaaaaggttatactattttgtaaagattataagatttttttgaaagccaagtcatttttgggtacatctatattagaaaagatttctaagtgggttttctggggttcgttctcaaatatattgtaggcttgtaagttacaaagcttttgacatttataaaaagaggcacattgcattttcttccccattaaagatgctcgtgaaacctcgtaagtcaccagtgattgaaatccccggctaccataaaaaagaaaaatcctcgccaactacgaaatgaaaacccatgtttatgatctggctaattttcttgtctttctctcttttgtagacaaaactgtgaccactgtgggaaaaaaggtcatgatacatgatccagagcggaaccctggagaagaagtaatgcagaacagggggaaacaacgaaaccattggctgagactgcacaacagaacttggcttctgtcttcttggcatggctgaaatgtgacaaggggtgatctgttgtacaaagtgtatcttgagggagatggcaacctctctctgtttttttctgtggatcagtgatattgtgt

SEQ ID NO: 15 - DNA, 1648 bp, Mus musculus
gccgcgcggagccgagcgggcaaggtgaatccagccctggggccggctgccggagcgcttggcgggggcgccggctccatgggcagcggcgctcggcacgatgatggacgttaacagcagcggccgccccgacctctacggccatctccgctctctcatcctgccggaggtggggcgcaggctgcaggacctgagccccgacggtggcgcccactcggtggtgagctcctggatgccgcacctgctgagcggcttcccagaggtgacagctagcccggcgcccacctgggacgcgcccccggacaatgtctccggctgcggggagcagatcaactatggcagagtcgagaaagttgtgatcggctccatcctgacgctcatcacgctgctgacgatcgcgggcaactgcctggtggtgatctcggtgtgctttgtcaagaagctccgccagccctccaactacctgattgtgtccctggcgctggctgacctctcggtggccgtggcggtcatgcctttcgttagtgtcacggacctcatcgggggcaagtggatcttcggccacttcttctgcaacgtcttcatcgccatggacgtcatgtgctgcacggcctcgatcatgaccctgtgcgtgatcagcatcgacaggtaccttgggatcaccaggcccctcacgtaccccgtgaggcagaatgggaaatgtatggccaaaatgattctgtcggtctggcttctctctgcctccatcaccttacctcctctcttcggatgggctcagaatgtgaacgatgacaaagtgtgcttgatcagccaggattttggctacacgatctactccaccgcagtggcgttttatatccccatgtcggtcatgctgttcatgtactatcagatttacaaggccgccaggaagagcgcagccaaacacaagttctcaggcttcccacgcgtgcagccggagagcgtcatctccctgaatggcgtggtgaaactccagaaggaggtggaagagtgtgcgaacctttcgagactgctcaaacacgaaaggaaaaacatttccatcttcaagagggaacagaaagcagccactaccttggggatcatcgtgggagccttcacggtgtgctggctgccgtttttcctcttgtccacagcaaggccctttatctgtggcacctcctgtagctgcatcccgctgtgggtggagaggacatgtctgtggctgggctatgcaaactctctcattaacccttttatatatgccttcttcaaccgggacctgaggaccacctatcgtagcctactccagtgccagtaccggaatatcaaccggaagctctctgctgcaggcatgcacgaagccctgaaacttgctgagaggcctgagagaagcgagtttgtgctacaaaactgtgaccactgtgggaaaaaaggtcatgatacatgatccagagcggaaccctggagaagaagtaatgcagaacagggggaaacaacgaaaccattggctgagactgcacaacagaacttggcttctgtcttcttggcatggctgaaatgtgacaaggggtgatctgttgtacaaagtgtatcttgagggagatggcaacctctctctgtttttttctgtggatcagtgatattgtgt

SEQ ID NO: 16 - protein, 440 aa, Mus musculus
MMDVNSSGRPDLYGHLRSLILPEVGRRLQDLSPDGGAHSVVSSWMPHLLSGFPEVTDAPTWDAPPDNVSGCGEQINYGRVEKVVIGSILTLITLLTIAGNCLVVISVCFVKKLRQPSNYLIVSLADLSVAVAVMPFVSVTDLIGGKWIFGHFFCNVFIAMDVMCCTASIMTLCVISIDRYLGIWLTYPVRQNGKCMAKMILSVWLLSASITLPPLFGWAQNVNDDKVCLISQDFGYTIYSTAVAFYIPMSVMLFMYYQIYKAARKSAAKHKFSGFPRVQPESVISLNGVVKLQKEVEECANLSRLLKHERKNISIFKREQKAATTLGIIVGAFTVCWLPFFLLSTARPFICGTSCSCIPLWVERTCLWLGYANSLINPFIYAFFNRDLRTYSLLQCQYRNINRKLSAAGMHEALKLAERPERSEFVLQNCDHCGKKGHDT

SEQ ID NO: 17 - DNA, 116318 bp, Homo sapiens
aggcgtccgtcgggggccgaagcgcctcccgcagggagtccccgtgaggccgcgctgccgcgttacccgcagcggccgggggtccggggagtgcggggctccgagacagagccaggcgccccccagcggtcggcgcgggccccatggctgggccgggcggagcggaaccggtgaggtgaagccccggggccggcagccggaggcgcgtggccggggcgccggctccatgggcagcggcacacggcggcgcgatgatggacgttaacagcagcggccgcccggacctctacgggcacctccgctctttccttctgccagaagtggggcgcgggctgcccgacttgagccccgacggtggcgccgacccggtcgcgggctcctgggcgccgcacctgctgagcgaggtgacagccagcccggcgcccacctgggacgcgcccccggacaatgcctccggctgtggggaacagatcaactacggcagagtcgagaaagttgtgatcggctccatcctgacgctcatcacgctgctgacgatcgcgggcaactgcctggtggtgatctccgtgtgcttcgtcaagaagctccgccagccctccaactacctgatcgtgtccctggcgctggccgacctctcggtggctgtggcggtcatgcccttcgtcagcgtcaccgacctcatcgggggcaagtggatctttggacactttttctgtaatgtcttcatcgccatggacgtcatgtgctgcacggcctcgatcatgaccctgtgcgtgatcagcattgacaggtaagggccggaccgccccgtcccaggctccggctggggaccggctggcagctcagccccgcgcgctcgcctttcctgggaggatcaagctagacttcaaggcgggatgaagggctgcgcttaaaacaccgctccccccaatccaccctacaccaaccaaacttcggttacggcatagcctatgtacatctttaaaagaaaaaccggaaatgttctggtttactgtagtgacgaatttaagaccaaagttaagagtattttaagccttagcatttccaccagcgggtcccttgccttggtttttggaaggaagggatttggtgctccctgacttgatcaagccttgctgtgagccttaaagagtcattaaaaaataataataataagtcggagaaaagccaccttgcttaccccattgtgggagctactccctaggccagtaaaaggaccttggatggttctagaattggggtttgtatgtcttacacattgcatctttatgatggtcagttcggaatcgcattcttgcttgtggaagtctggtttcaatgtttggtaatgctgtctgtatcttgcgagcttgctgactggagccttcctccaggtctgaatggctggttctagcctttcatcatagcccttgggaaccttctcttgagaactcccccactggagtaattgaaacagaggctgaccatctgtcagggatgctaggggaaaaattcctgccttgggtgtcatattgaactaggagacccacagggtttcttcaggctgtaaggttacaggcttttgaaatggagctagtctttgacccttgaaatattatgcagttgacaacttgaagtatggtctcaatcctctttggcctaaaacaactctatttcacttgaaactgaaatatgagaccttaatattcacactcagaattttgccggtgtttcaagactagtatcctgttgtgtttaatgatacagagaaatggttgcttattttcttagtggatctatagaacctttatatgtgtagatctttcagcctaggggaaataattgatgcctccacacttaaaatgacagtgcctcaaaggatggtctagcatgaaactgagattttcctttttttcttcttgaaaacactgctgtttgtggtttgctggtacttaaaatgttctgctgtatgtattttttgcttgaccagggtttataattactaaataaaggaaataatagaaaagggaatattttcaagaagaaaaacacattgtagctccatttagctaacaatttaggttatttttctttaaattgattctaccattttatatatcatggtagaagctgctgacagcaaacaaggaattacttaagagcagagcatgaactgcatatgtgagaatattagcaccaaatttggcagctgaagttctgaattacagtagttaagaatgacaaaacatatgtatttacagtctgactgtggcaactggaattaggagagtgcactcaatacacatagtaagtgtatacatgaattataagcacagaaatctgactgctcagccaaccaaaacagagcatcctgcatgaatggagtccttttaaatggaacttagtgtaataaaacaaataacggtttatgctgcaagtactgtatttataaccattttttaaaatttcacagttgataaatgatacataaataataccttgtgctaatttgtctcctaagacagccagtgtttctcctcttctgggctacattgaggtttggctgagatcaccttgtgattcctatacatgagctaaaggcattctccactcagcgtgcatgtgtgacttagcatcggcaggcatgtcctgaatactgagaagacattaatccttcttggcaagagcttaagattttgttgttaactgtattcttatgattgtcacaaattgtggtaacataggcatatagattctccttttacctatgagaattgccccattggtgaattctgcttaaaaattattttagaagatcagcatatcatttctttagagaaaatgaagaattgataaaattggaagacacagactgattttcttccaagaacactgagaactaaaaatgagaaaaaaggaaaatatattatttctgaaaagcatgttttctgcaattccgttgtagaatatgacagatgatattaaatgtgctgtgaaaatatgtaaaaaaaaaatcttcattcccttgttcattccctcttgagtacctaatataggttacactgtgctttgtgcagcataatcaaagattaattacaatattgttgcttttgtgctcattacaggcttttgtgtatttggagagtttggatatctgttgggcatttagcctgtctaaaatggaacctttcatttttcttaaccactccccatcacaccgggatgcttttctaatgtaatgccatactgtttttcacaggcttcagagctcccatcccgtctttttcagaaaatgatttgtattcattgaaaaagtagcagccatcagatgagaacttttatctttcccccaccaaacaatctgatctgtcctgcatgtgtacccttctttttacttctttccagttaaaaagcaaaaagacattgtgagccagcaaataccaaactacttggactttatattccatctccccaccttctcaaggtctttgttcctttattgtttcttcatggatggtcttttttgttgttattgttttgttgtttttttggggggagtgaggtggagggggacagaatctcactctgttacccaggctggagtgcagtggtgccatctctgctcactgcaccctccgcctcctgggttcaggtgattctcgtgcctgagcccctgcaaatacctaggattacaggtgcacgccaccacacccggctaatttttgaattttagtagacacggggttttgccatgttggcaaactcatgacatcaactgatccgcccacctcggcctcccaaaatgctgggattacaggcgtgagccaccaggcccagcttattgatggtctttcttcagcttttcctttctactgtgtcaagtttggttttctatcttttaaaacccttctttggcctctggcctcacttcttcctccagccacggctctgcttcacagttaagctgctcaaagaattgtatccataagttgtcttttcttccttgcgctttagatagatgactttgatgctcatcaggtttactgcaatattctaattggctttcctggttccacttctgtccagccccgagctattccctaagaagaagcaagaatggtctatttagaaactttttaaagtgagataatttacatataatggcatgcacagatcttaaatattcaatttgtatgttgacaaatatatatacctatgtgactaatgttctaatcaagatatagaatatcttgtcatccaagaaagttcccttgtgctaatttaagaatgatcttttaaaaatagaaatcaaattaccagccagatgtggtgactcacaactgtaatcccagcactttgggaggctgaggctggaggattgctggagccctggagttcaagaccagcctgggcaacacagggagactcccatctctacggaaaaaaaaaaaagaaaagaaaagaaacaaaaaagccaggcatggtggcaaatgcctgtgttctcaattacttgggaagctgaggtgggaggatcactttggcccaggaggttgaggctgcagcgagccaagattacaccactgcactctagcctgggcaatagagtgaggcactgtcttaaaaaaaaaaaaaaaagaaaaaaaaaagaaatcaaattactttttatgcatagttttaaaacatgaaaaatagttttacatatcatttagggaagcttgtagaaagagtaaaagtataaaatagtgcaagggagtggttgacgccaaattcaggacagtgatttatctctggtggggtgggtggtggtgtaatcagtagtatatatatcacctatattggtaatgttttgtttcttaatctcggtggtggatatagacttattatcctttgtataactttttgtatgactgaaatatttgttaaaactttttgaaattcatatagaaaagtatatgtatgtgcacaattctaaggatgaagcttgatgaatttccacatccatgtaaacaactatattaagaaatagaacactggcaacctcccagaggtcccctcctctccttttctagtttctattgcttgcaaagggaaccattgtcctgacattagcatcatgcattggggttttgcttggctagaacttcatataaatggaattgtatagtatgtactcttttgaatctggcttctatttctcaacataatgtctgtgagagtcatctgtagtttttagcctatcagtggttcattcatttttattgataagtagtattccgttgtataaatataccataatttgcttatccattcaccgtagatggacatttgagtttttttctagtttctggctatctctaatagtgctgctctgaacatttatttatgtgcaagtcatttgtggatatgtttaaatttattttggggaaatacaatcctaggtaataaggtactttggaacattttaattttatctatcccctcacaccttttatgttattattgtcattcattttaggtctacagattattaaaacccattagatattatttttattgttgtaacagtccgtattcattcttctttgcttacatgtttatcttttccattgttctttgttttgttctgcattactacattttcatctgagatcattttcttctgcccagttagatgcctattagcattattatttttttaaattaaaaactttttttttttttttttttttttacttcacataaagagacagtctcgctatgttgcccaggctggtcttgaactcccggcctcaagtaattctcccaccctggcctcccaaagtgctgagattacagatataagccatcatgcccggcccagcattatttttttactgaatgtattagtctgttctcatgctgctaataaagacgtacccaagactgggtaatttataaaggaaagaggtttaattgactcacagttccacaaggctggagaggcctcacaatcatggtggaaggtgaaggggaagcaagacatgtctttcatggcagcaggcaagagagagcttgtgcacgggaactcccatttataaaaccatcagatcttgtgagacttattcactaccaggagaacggtatgggggaaaccacccccatgattcagttatctccacctggctctgcccttgacatgtggggattattacaattcaaggtgagatttggttggggacacagccaaaccatattactgagggtttgctagtgacaaatcctctcaattcttacttgtctgaaaatgtctttgtttcagcttccttcttttttttttttttttttttttttgggacggagtctcactctgtcgcccaggctggagtgcagtggtgtgatctcagctcactgcaagctccgcctcctggactcacaccattctcctgccttagcctccagagtagctgggagtacaggcgtctgccaccacgccctgctaatttttgtatttttagtagagacggggtttcaccttgttagccaggatggtcttgatctcctgacctcatgatccgcccgccttggcctcccaaagtgctgggattgcaggtgtgagccaacgcacccagcctcagcttcatttttgaatgatattttcactgagtatggaattttatatttctagtttttttccccagaactttaaaacattgttccattgtcttctgactgccatcatttctgttgaaaaatcagccattagccaacattattatcactccatggaaggtaatgtgtcttttttaccctgacttttagggttttgtctttgcctttaatttttatcagtttttctgtgatgtctctaggtctggctttattgatttttttgttgttattgtcgtttatttactgttaaccctgtttggggttcctaatgatttttaaaatttgtgtattgatatctttaatcagtttgctgttatctcgtcaaacactactactgttccattctttacttctctatgtcttcaaacatatgtattgtagacctttttactctgtcacacatatttcttactcttttctatattttccattttatgttttacatctgtgcttgagttttgaaaaaattttgaccagccttccaatttgttaattgtctcttctactatgtctaatctgttgttcaaccttatctattgagttaatttccataatagtattttacaattctagaaattccatttaagctttttaaactgattctgatttttttggtgaaattctctaccttttcatctaatttcttcatcttgttatattttttagtgtattaatcatagtttgactcttcgtttcctgactccaatatctgagtcacttgtggtttctttgtgtgatctgtttttttctctgggtttttggtctgtgtcttggcatgcctagcaaatgttgattgtatattcatcatattgcatgaaaaattgtagatgctgtagatgatgttattttgttccagagaaaatgctaggcaggcatattggacaactgattattttaatccaattagggactgagctgaacataggctgtattttagttctgttagagctctgccactggcagatgcctctttctaggatgtagccttcttaggattttagcccaatgacttccacccctggctagttcagaactttaaatgttctttcctcaaaactgtaagactatcaagcatggcttcttagcctcctgccttatgcagtctcagaattcagcaaatgttttgagggaactaacaggtgctgggcttaggtttcactggcatctttgccttttaggcctctgacttttgcctctctatctccaagagactgccaagtgctcttctggtgtttttgccccttattagcaactctctgctgaggctctttacctggatccttagccccttacccttcacccaattttggcaagtgccccaagggaaagagcagctgcacaatattggcttgcctccctgtgcttctgtcttctctaggattttgttccctgaagtcctggttgtctcaacaactgcttgatgctttcgggcatcatagcgtgcatgcgtgtgtgagtgtgtgtgtatttgtgctttatccagcttttaaagtggctttcagcagaagcattggtctgaagtatcaaacaaccccatcatggctagaagtggctatgtgcctgaaatattttaaatgtatgctaatatagaaatataattatgtaaatttcctgcttaaaatttttaattttcttttcatttcacttggaataaaattcactctttagcacatgtaggaggtccttggtttgtccctgcctcactcctcaacatcttgaactgcattctgtcttgttcgccacattccagtcacattgacctttctcagtttctctattgtaccagattctttcctgcatcgggtttactccatgaaaactcaccaactaatatatttgtgaaactgattttacatctgaagttctgttctctaatatgtgttttttttttaattctaagttggaaagtttaagtgtttaaccctctagattgacaacaattaaaatgtcaaaaaactaccaagtgttgggaaggatatggagcaaagggaatttacatacattactagtgggattataaattggtgaactacgttgcaaatagtttagtgttatcatgtaatgttaaaaatacatacaccctaagaccctgttattttatcaccaggtacatatcagaaagatgcttgtccaccaaaagtcttctacaagaatatttatagaatccacaaacttgaaaccttaaaacttgaaataatacacctgtgtgtcagtagtagaatgaataaataaattgtggtatattcatacaacagaatgctatttaggagtgtttatcaaacttgaatgtgcatcagaactacctggagagcttattaaaacacagattgttgggcctaaccccagaccttaccaaatcagaaaccttaccccaagagtttctgatttcaaaagtctggggttgggctaagaatttacagttcacataaattcccaggtgattctgatgcttctggtcttgggatcttacttagagaagtattgctatacagcaatgaaaatgaacaaattctaactacacccagcaaccaagtgaatctcatgaagtaatttaaatgattttttgttatataaattttgaaacatattttaaagtcaagtatactataatgagtctgatgtatccatcatccatcttcaacagtgatcaacttatggtcgatttattcaaaatatactttgcaattcttccttcatccaattattttaaatcaaatttcagatgtcatatcatttcactgataaatattttatggttacaaatgtaaggctgagcagaagcagcaaaatataaagtatatacatatgtgattccattcaaataaaaattttaaatagacaaaaatatttttagggacgtacataagtggtaatattataaagaaaaggaaggaaatatatatcataagaacaaagaggccaggcacagtggcttacacctataatgccagcatgccagcactttggaaggctgaggcgggcagatcacctgaggtctggagttcgagaccagcctgaccaacatggagaaactccgtctctactagaaatacaaaattagctgggtatgctggcgcatgcctgtaatcccagttactcgggaggcaggagaatcgcttgaacccgggaggccgaggttgcggtgagccgagatcgcgccattgcactccagcttgggcaacaagagcaaatcctgccaaaaaaaaaaaaaaaaaaagaacaaagagagagtgattgcttttagatgggatggagaaaactgagatcagagcggcatgcttctaaggtggtgtagtgttttctttcttgactggagtggtaattacacaagggttaacttaattattgttaaagtgtccatgtatattttaggcactttcctgtatatgtattttattttataatgaaaggggcaaaagtatgtatttgatacatctcttgaggtatatttggattaagtcagatatatgattaatctgagcagatacagttattgttttaatgctgtcagcaaccattagtttttagctttgtgtatgagggcaggggccacctttgggttgttcatggttacaggaactcatctgccttatttgcaagagctgtaatatttagctctgattggtatctggctgaagccttgcttcctcgccaggtactatgactcattccctctgatgatctgagttctgcttttggctttaattctgcttcaatcagcagggcagggtgcattctggcttctccagactcctttcacttcaaaggaagttatccttgctcatctctaaaattaattttctgcttgtagatacattttaagaattgatggaatcttcttctggctttgctatgggaaagtgagaaggagatgaaatgggtcttctgccctgttcttttgtgtagtaacacttagccaccaactgcttttttttttcctctcatgttaactaacaggaagtaatgcttcagggtagaaatgataatagctaatagatgtttaatgatttattgcttacagaccactcccaaatacagaaatctccactgatcccctctacaacattgtgaggtgggcatcagtatccccacttgatgtaggaggaacttgaggctcagagggtagaagtgacttgacaaggacatacagtttgtatggatggaacttgtgttcaaagcttgttcaaatattgtgtatttatttatatctatgtgtgtaaatatatctaaggaaaataataaaagtggagacatggaacattccagtcaaaggagcagcagatgccaggaacacagaggcagtgaatcagtgtttgaatgaactcacagagagggagcaggaaggcattctgagtgagggaatagcataggagaagcacaagtcaataacccttcaccccttgcagtagatactgctggttgcctaccccaatctccgtcctccccttccccctttagttatgggaattcctgctttgacctgggaatatggctgcccagaataaaggctgcatttcttagcctcccttacagctagatgtggccatgttactaaatttgggcttgagagatgttagtagaagtattatgtttcagcttcccagaaactgccttcaagaaaattggtgtgtgccgtcttcctcttttctgtcctttcctccatcttcttgcctggaatatgaagatggtggctagagctctggccacttagtcaagatggacaaaaatggtcatgcttgttaaagaggagcagtatgctggaagggtagcctggatcgtggaggactgtcaactccacagaattgctggaaccttgacttcttactaattgatgaactaataccattatgttgtttatcacatgcagctgaacttaatctcaactgctaaacctagtacaaattgggcatccctgatctgaaagtctgaaacccaaaatgctccaagattagaatctttgagtactgacatgatgccacaggtagaaaatttcacacctgacctcatgtgatgggcacacaaaattatttagaatattgtataagattacttcatatcatttcactgataaatattttgatttttgggtacaaggtaaatatagaacataaatgaattttgtgtttagacttaggtcccatcctcaagatattttattatgtatatgcacatatttcaaaatataaaaaagattctaagcattttggatcagggatactcaacttgtacacatttcttctccctgtcacccatccttcccacagatgtttatatacactttttttttccaccttggcatatgattctattttgagaacaggcaaaagagaacaatgtgtctgaagtgctggtcagccacagaatcttgggtggcattggaacagagggtgaggtaccatggaaacaaaattcttgggcagaagatcacggagtgaagggtccagggggaaagctcatggcttctgggcaccaagggtggccatcccatgcaggcggtggtcttcttggaggccagccatcatgtgcagtgccaggaagtctccagatgcagggcggtgaccactggggcaccacctacactttctaaaacttcattgtgagagtgtcactgggtcatgcttctttggaaacccttcagggataacactaccattttatgaatgcgttttgtgctacttaggtttctagacacttgacacatggtatctcatagaatctttacaatatccttgtgagggtgtttttcgagtgtctgtcgttgagtgactctgctggtcaaagatgaacaagacatatatgaacacttttaatgccatgctataggtgaggaagctgaggaagctcacatacattgtatgtgactggaacagtgtctgaatccaaaggtcatacgtatttcactacgtcattgtagccattgcctgctatatgaggaggatattgttaggatagcattcaaggctctttatcatttgattgcagtcccttacagctttattctggccaactctccgaagacaccctccttttcaacactacatcagaacagaaatagtgctcttacttccgcaccttgttcctcgtccaaggttcccatcccaaaaagtgccatcagtttgcacccagttgatttgctagacatttgagtatcgtttttgaaactttccacttcagctttccactgtcacttactgatcaccaagtcctcctgattgtgcctacacagccccctacccccagcaactcaacttcagcccctatcatctttcagttgggcactcacagtagcctcttgggggtctctgggtcttcatccttggcccctgttaatgcggggtgcacaaccctggctgcatgttagaatcacctgggcaactttataccagtgcttggggagaccccctagagattcttatttaattgatgccagatgggcctgggcgtcacatcagtatatttgaaaatatcctccagatgatcccaatgtgcagccagagtgagaacccctgagccagactgatctttttttttttttttttttttttttttttttttttttagacggagtctcattctgttgcccaggctggagtgcagtggcacaatctcggctcactgcaagctacgcctcccgggttcatgccattctcctgcctcagcctcccgagtagctgggactacaggctcccaccaccacgcccggctaattttttttgtatttttagtagaggcggggtttcactgtgttagccaggatggtctcgatctcctgacctcatgatccgcctgcctctgcctcccaaagtgctgggattacaggcataagccactgcgcccggccagactgatctttaaaacataaaaatgtgattatatccatggttcccaaactcatctgcatatcagagtcacctaggaatcccctcaaaattccaaagcactggccataccaagactaattaattcataatatctggaagtgggactcatgcatccatattttttgaagctccctagtctaatgtgcagataggtttgggcactactgggtcatgctgttctccagttcaaactatttattgggttctcctggtcttgggataagatagtaaatctttaatgtgacctaaaatattatatgatctggcctctgccaatctcactaaatcaggggttggcaaacactttttttctgtaaaggtatagacagtaaatattttaagcttgtggactgtaaggtctctgttgcaactcctcaactctgccactgtagcatgaaagcagccatagataatatgcaaatgtgtgggtgtggctgtgttccaataaagctttatttatggatacagaaaactgaatttgatataattttaacatgtcataaaatagcattcttctctttgatttttttcaactacttaaaaatacaaagaccattcttagctgggggccatacaaaaacagactgggaccagatttggtcttactggagcttgccagcttctgctccagatttgatttggtcccatttaattctttccctcctttccttctttccccctttcttttcttccacctttccttctttccccctttcttttctcccacctttccttcctttcttcctacctaccaccaactaaccagtcatgtaccatactgcctctcctccccgtattttggcaattctggtcttctttcagttccttgacactgggtcttcacacatctattcatgtctcccctggaatattcttctagctctttagctgggtaatttttatcactcttcaggcaggtccttgattagatattactaggtcatgacacatttctagaatcccctgactatcttaaacagtcttttaacaccttgcactttttcttcctaattcttacctcaatttgtaattaatggtttgtaaaattaactgtaataaagtcatgatttatgggatcatctgtacactctgcatagcatgacccaggcttatcttgaagactgtattgccagcctgttggcatagtactttgtacttggtaggtgttcagttaatctttgtggattgactgtggaaggaagggagggagggaaggaagaaggaacaaaagaaaaaaaaaggagggaaggaagtaggaaggaaggaaaaaaaaggagggaaggagggaagaaagggaagaaaaaagggaatggtgcctctgattctcaaatccacacatgtggccttgacttcttattctgcagcttcctataagacattcctcttggtggcagtggagaagtttacttgagaaaccaagttaggatcaggagatgtctggtgaaaacagaagcagtgtagaggcagtgggacagtcccaagggatggcctcatgagaacatagtaggctggtgagttacttcctgttctgcagaacaccgacattagcaaagctgccagtgatgtgaaggtcttagcagcttagatccaggagttagctttttagtatcatcagtgctgtgctatggagcagtgtgagaacataggcaaaattaaatgaaaatctcagggtccttttttttttttcactaaataaacacatttttgatgaaggccacacatcccagaaagaaagccatgggtgtcagccatgaaggcaatatccaagtagaggagcataggaactggcagtagcaatcccattgttgggtgccaagggctatgcatgattcatctcatttaatccccatgaccactctgtgggcacactcacacccccacccctactcctgggtgatgaggacagggaggctgatagaggttaggagtacacagcaagaaaggagtggtatcaggtttggccatgaggaatgtctgactccagatctgtcttaccccttcatgctgctataacaaaatacccaagactgggtaatttataaacaacagaaatttgtttctcacagttctagaggctgggaagtccaagatcaaggcacagtcaagttccatgtctggtaaagactgcttgcaagatggtgccttgttgctgcatcgtcatgtggcaaaaagaacagagggcaaaagggcctagcaaatttactccagcccttttatgaggttgctaatcccatccatgagggctctaacctcatgacttaatcacctcccaaaagtctgcctcttaatactatcacattgaggttcaagttccaatatatgaatttttgagggacatatacattcaaaccataacaggatcttttttcttgttgttgttgttgtttttgtttttgtttttctttgagacagagtcttgctctatgcccaggctgaagtgaagtggcatgatctcggctcactgcaacctctgtctcctgggttcaaatgattcttctgcctcagccttccaagtagctgcgattacagtcgtgcaccatcacgcctggctaatgtttgtatttttagtagagatgagttttcaccatgatggccaggctggtcttgagctcctagcttcaagtgatcagccaactttggcctcccaaattgctgagattacaggtgtgagccatcacgcccggccagcagggtcttccaaggctcaagggggcactggctttgtgaacatgatttatgaaccatgtcgaccatggaccattttctcttgcctttcagagaagaagatgatgttaataataattattagaatataaatttatagtctcatctaaaacccttaggatcagaggtatttcagaatggaagggggccatgagccaaagaatgggagaagcctctaaaagacggaaaaggtgatgaaatgaatcctctctagagtctccagaaaggaacacagcctgtagacaccttgattttagtccagggacccacatttgacttctgacctacagaactgcgggataaaaaatttttgttgttttaagccactgagtttgtgggaacttgttatagtaccaatagaaattaatacaaccagttttaagaacaaggtctgatttcagagcttttcaggctttagatttatggttaagaaattgtggacctgtaagtagtcttaactgtgcattactcaagatactaagtgtcctattgaaggcacttttattatcgctgttttacagatgagaaagctgaggctccgagaggttgacaaatatgcctaaggttgcagaactaataagtgaccagtctgggacttgaagccatggctctttttctgtttcatggtctgtgctcttagactgcttgcttctaagcaattgttggtgcctagatttgaggcttaaagctttgaccagtgtcagggactgtacttaatgctggggataaggatgaacaagttaaagatgaatactgcccaggccttggagtcaacagacctgagttcaggtcccaaatttgacatttgtagttctgtggccatgtagacattatttaacttctttgagtttcaggatagtcatctatgacataggtaatactaatgccttcctcataggtttgtgatagttaattgggttggtgtaggtgaagtcttttgttgcatgcctggctaacaccaattgtgctgataaatgtgagctgttacacttattagtagtgttgttgtgttaatattatgcttctctagtaaggaacatattgttgtgaatagaggagtcaggtctctaagaaaaatttgaacagttcttaaaagttgaaggagttgaaagaacaagacaaactccatgcctgtgtcacacaggattcccttctcttggttgcggtggctgctgtaagtgttgggtgttgaggacacttgcattgcatactgcagctaagttttctgcatgtttggggtaggagaatgaagcagcctatctgatcacttggctttactcctttccagtgtcattccaggcacttttattatccccattttacagatgagaaagctgctgtcactccctgccatcagttagattttgggttacgatgacaattaaggtattatggactatcagatctagtccttcacagatttaagatagaatctaagcagtgagctctaacagagaggccagatgtgtgtgtgtgtgtgtgtgtgtgtgtgtgtgtgtgagagagagagagagaaacagatggagagacagacagatggagagatggagaggagagaggaaaagatgattgcatgcaaaccaagttagagaagatggtggtggtgagatttatttaataagcaaactgttactgcttgcctactagatatttaagaactatgaggatacaaaagtggataaagacacattcccatccttaacatgttatctagttgagggtaaattaagactatttcattcatgtcagaaaatttagagcttttgaaagttaggttatagatactgctttacagtcaattcctgtgtgataggacctttcttgaaagagatatgagtcatttagcttctggttgcaaacaattgtgttgttttattagcacttctgtcaataaaaaccctggtattctctggtctgttttccaacagcctttttgtgcctgaagacttcttaaggacccctgcaaaatgatggctcctagatcaaacctaagtgctcactcttctgatgttgcgtgttaaagtaaatctgggattggggactatctctagtgcatctgtttggggagctttatttcacccatttatccagtttgtattatcactttcatcatggcctctgttctgattcaaatccctgagtattctgtttttctgggcatgcttataacatattccattctctaaaagagaggcagctacatagctttcttccttttaaatggtttttttttcatctggaacatgaggcagaaccatctaccaaaaaggggctatcaatatttatggtcaaacatggggagacttaaaaggcatgctccaatccatccataatcaatctggtccagttgcctgaatatttcagaattatattccgggaaatgtatattctgtatgtttggattgaaaagtctctgctattttcagtagaagtctttgaaaattctttcatactgatgaaaggattgtcttacaatttttcatttgatagttttctgagttccacaggcccctactaattgagcttcttttctgggccacaaaggtgatagccctttattagcaactccttagcataataaaattgccttttcttattatgtgagttatacaggatttatctttttgcttttttaatatttattgactacctaatctatgttggttagtcttccttatcataagcaaggcaaataacacctttgctctctaggatcttatattctagtaagaataaacaggtagataagaaacagataagttaaaacacacacacacacattaatttgttagtaataagtatcacgcacaattaaaatagggcaatgtgtaagagtgggtgatcatggagggcctttctgaggaggtgacatgtaactgagatgtaaatgacatgaaggagccagctgtgtgaagatcaggaaaaagaactttctaggcaaaggcagcagctggcagaaaggccctgggccagtgtgattggaggagagagacaaaaggaaaacctggaaggagatgagattagagaagtgttgcaaattatattgggattcagaccaggtaaagagtttggactttattctaagtgcggcagaaccactggagactttgaaacatagggtgaaatggtctggcttttaattttaatggttcattgtggttactttgtggagaatgaaatggaggagggtgagaatgaaaacttggagaccaatgggaaggcttctacgttagtcaaggcaagaggtaatcgtagcttggactgggttggagtagtggagacagagacaactggagaaattccggatctgtcttggaggtgtatcggcaggccttgctgatggactggatgtaggcgctgagggagacaggcatgaaggatgactcttgtgcttttggctcaagcaattcagtagatggtgatactgtttaccaagacatgatggtagtagaattggtggtaaaaatcaagagttctattttgattgataaattttatatcaatagacatttgaatatgagtctagaattccagagagaagtcaggactagaggtaaaaaattggttgtgattgtaaatgatacttcaggcaatggtgtgggagagagcagataggaaaaggggtttaaacaccaagctttgagggataaaatgtttggaggttaagagaaggacccagcaatgcttaaaaagggatggttagtcagtgcgatatgaggaacacctgtcatggaaattaaggggaaagtgttttgacaaagatggaatataatcaaattggtgaccttgaagtcattggtgatcttgagtagttttagtgaagcagtcagatggaagccagcaagagtcaggtaaagagaagatgagaggaaaggagagatggcagctagaagcaactcttccaagaagttttgctgataggcactcacctggaagtcaaaggacctggattccagcccagatgtgccgcactgtagtctgatgataattgtttgtgttagtcattttctgttgttataacagaataccacagattgggtagcttatgaagaaaataattttatttagcacagtgttctggaagctgggaagttcaagagcttagtgccaacatctggtgacagccttcttgctgcatcatagcatgttgagagggcaagagccagagagctagagagagagttcactttataacaaagccactctggagataatgagcccactcccatggtagtgacattaatccattcatgaaggcagagggattaagtttccaacacatgaacttttaggcaacacattcaaccatatcattgtttatgtaagtgtcttatattccactaggatgcacaaaaactttgaggtccttattcacttcaacttcctaatacttaaaaagttcttggcacatggtaaatacttaaacacattttagttgaatgaatggatggataaattaatgaatattctactagagtagaaacactttaggctcaagaccacgtctgattaatcttctacaggccgtgcaaactagtcaggatgcaaaaatatttctaaatgaataaatgactctaatgaactgaggggtatagtagggaagctggggccaggaaagtccagagatgggagctgtttagaccaaggttctcacaggactgggtaagacctgggactgaggtttaagggcatagaaagctgttgtagtagaagacaggggataggatacaggttcttctgaatttgtctctgactccctaactatgaccttacataagttgttatgtcttatctctaaaccatattcctcatgatgatagaaatatcactgtagagttaatgtgaggatttaatgagattacattcacagctgaacatggtggctcatgcctgtgatcacagcactttgggaagccaaggcgggagaattagtccagctcaggagttcaagactggcctgggcaatatagcaagacaccatctctacaaaaaaaaaaaaaaattctggtgtggtggtacacgcctgtaagtcctagccactcaggaggctgaggtgaaaggattgcttgggccccagaggtcgaggctacagtgaggtgtgtcataccactgtactccagcgtgagcaacagagcaagaccctgtctcaaattttaaaaaaattttaattaacaatatatattcacaaagggtttagtcaatggcttgactcatataaacacccactgacaggcagcattgttattaatactattggtaatattgttcgatactgacctgtaccagggacttaggttataccaccagtcagttagggcagctttctgggattaaggagttatttgaatgggagggcttgctgatgttctttctgactctccgttttcatcctaaaagcaataaataaatcaagtttacctttgggaaaaacctgtattggggcttgatgaggcttcagggagtgccatcctgccctccaaagcaccctatgtgtttattgatgtcagcaatgggggccaaagtgtatccaataatcgagttcagatgctgctcaaggtaagtcagtggcttgaattcattcacgctgaggtgggatcagtaggtcggtcgggaaggatacgtaatttgtgtcttatataatgttttagcgaatggggagggtttgggtgcatcatcacacctcagatagcatccaagttgttcttgccctttccttgtgtacttcctgtcatatgttctcctgtgcttccataccccagtacaagttgtttcctctgcttggagtgctctacccttgtctgcctatttcctaaacattctttgagattcagctaaagtgccacagcctttggaaagctgtgtctgacactgaggtctgggttaggtgtccctctcaagctctcccttagtcccctgagcttccttctctactctcatcatgctgaattgtaattgtttatatttctgggtcccttgcacaccaaatgctgaggtcctttgggacagggcatcttatttatctgtgttttcttccagctcctattagtatgtggaaggtgctcaataaatgtttggtggattagtggttgagtgaatgaatgaatgaaacaagaaaacaagcaatagttgactgtttaatcaggtcttggtataaaacaggtaggcagaggaatatgaaagagagacatagaagctgcaccactgatgacccagttctgccttggtgggttgtgtttttttcttccctaagtggagacctcatcatagctgccaggaccatttgttctgtgactttgaaggcttagccctgctttatgtgatttatgaggacactgccaatttcattcccaggatgttctgtcattaaggtcttcctgtaagggtggtcagtacaatgggattttacctgcatagctcattatatgaacatctccagcatggggatggtttagcttattgggttactttccaagccctagaggcaagactagacactggaaatagtatgatagctatagtgatttcaaatatacctatacagaatgggaaatcataagatgaactctaaccttatctccagaacctcccaaaacatacacattactacatcttgggtgagtcagacgcatttttacatttccacagtggttcttgtcttgattcttcttccagggaatagcaaatttttcctggaaaattcctaggagacgataacattccctgtcccaagatatcacttgtatgcagccttgtgatagactgtaaaaactgcccccaattcttcctgttcctacatgcacacccctctcaagggtgactttgcaccccttcctacacagaatttaggattggccttataacttgctttacctaatgggatcttagcaaacatgacacaggcagagacgtgaaaaggggggttcattggagttggccttttgcttcttttggggaccctgtgactgctagctaccatgtgaagaagccctcattggacaatgagagacccatggcctactcattctatttccttggctgccagtcgccagtcaagtgaatgaatgaagttattatagattgtccagacatgagcagatctatcacctgaccacagacacagagaaaacccaactgagatgatctgaacctgcctggactggaacagcccagctgactcacagaagagcaagctgaataaaaggctgtggtttaagccgcaaggttttgcagtagtttgttatacagaaaaagctaactgatgtagcaggcctttagtgatttcccccaccccccgaatttatgttcccatatttatgtattcagattataacacaatgttcatctccatcatgttctttggatggttgttcatgagtctgcctccccagtagactttggatactccaagggtaggagcactatttggaggactagtaggatttgcacacctaaggcctagcccagtgccagggactaagaatgtgctctggaaatgtggatggactccatgaatgtgtgtgtgcaccagtagctcctttatttatttccctcctactcctcagctgggtatataaaacctgatgtttgctatattcttgaaattttctgttttcgcattctcttttgcagtaagcgtgccttttacctatccttgtaatttcttagtgtacctatagatagacaacagcaaagtgcccccaagttttttcaaaataggattatgtagtcataaaagacaccagccaaaataaagccttttgataataatccaagtttcctttttctaaattacatctttcaaatagcattatgtgatgattgatttttatttcatttagatttaattttattttcaatgtgtaagtttcatattttcaaaatgaacaatcttcccaatgaaagctattaatttcatcttgtctaaggtgataaatcatttcctgtgtctcttcactaaaatccatgattattactggcattttgggaaccccaggaagtcatgtgaaggaggcccccagagacaaaatgaaggaaaaggaagataactcagataaaagccattaacaactccccaagaaatttttgtcaaataaatcctcaatgtaagattaataataaatgttactatttattagtcaggccctgtgttacatgctgaatatctcttttaatctttacaacaaccccatgcggtacgttctattaccctccttttacaaataaggaaaggcttagataatttaatcaggttacccagagtcagaacctggaatcaaaccagcatgggtctgctttcagagctggtgccttaactcttaagcttcacagagaagggaatgtaaaatatggtctattcatggtaaatcatgtatcctcttttaaaaagataaaaatcaaataacatatctagagcttggaaggtcccctagaggcatgatctcgacactctggaatattctctacagtggtggagtaggggctgaccttggtgtatactttggttcatatccatttctaatggcctaggagtttcaggcttggcatgcccaaggtcagttgaggtcgagctatcctcacaactaccagagaatgttaaaactggaagggacctgtgctagttcatgtctccaagtctactccaccttcctccaccccatcctcttccctgggaaactgacatgctgtttggcttcaatgggttcagccagtggagagtccagggaaggatatcagagggagtgggaaggtggagagtggactccctgcttgtaggcccaccttgcactggctgtgcccttgtctggaagtcactggtctttttcagagggccttttctgcgtgactccttccttctggaccatgttttgtcctcttccctcctccctgtgggcctgggatggcgaatgttctgttgctgaactcttatggttttcctactgagaggtgacagcgtgctggcagctctcacagccctcgctcactctcggtgcctccttggcctcggtgcccattctggccatgcttgaggagcccttcagcccactgctgcactgtgggagcccttctctgggctggctgaggctggagccagctccctcagcttgtgggaaggtgtggagagagaggcacgagcgggaaccggggctgtgcatggagcttgagggccagctggagttccgggtgggcgtgggcttggcgggcccgcactcggagcagccggctggccctgccaccccaagcagtgaggggcttagcacctgggccagcagctgcagagggtgtgccgggtcccccagcagtgctggcccacctgcgctgtgctagatttctagccgggccttagctgcctctcctcggggcagggcttgggacctgcatcccaccatgcctgggtctcccctacacccaccgtggcctcctgcactgcctgagcctctccgacgagtgccaccccctgctccacggcgcctggtcccatccaccacccaagggctgaggagtgcacccgcatggcgtgggacttgcagacagctccacctgcagccccagtgccagatccactgggtgaagccagctgggctcctgagtctgatggggacttggagaatctttatgtctagctaagggattgtaaatacaccaatcaacactctgtatctagctcaaggtttgtaaacacaccaatcagcaccctatgtctagctcagggtttgtgaatgcgccaatcggcactctgtatctagttaatctggtggggactcgcagaacatttatgtctagctaagggattgtgaatgcaccaatcgacactctgtatctaactcaagggattgtaaatacaccaatcagcactctgtgcctagctcagggtttgtaaatacaccagtcgacactctgtatctagctaatctagtggggacgtggataacttttgtgtctagctcagggattgtaaacgcaccaatcagcaccctgtcaaaacggaccaatcaactctctgtaaaacagaccaatcggctctctgtaaaatggaccaatccgcaggttgtgggtggagccagataagagaataaaagcaggctgcgcgagccagcagtggcaacccgctggggtccctttccacagtttggaagcaatgtgttttgctttttgcaatagatcttgctactgcccactttttgggtccacactgcttttatgagctgtaacactcacagcgaagatttgcagcttcactcctgaagtcaccgagaccacgaacccaccgggaggaacaaacaactccagatgtgccggcttgagctgtaacactcaccgccaaggtctgcagcttcactcctgagtcagcgagaccatgaacccaccagaaggaagaaactccgaacacagccgaacatcagaaggaacaaactccggacacgctgcctttaagaactgtaacactcacggcgagggtctgcggcttcattcttgaagtcagtgagaccaagagcctaccaattccggacacactacctccagcccatgggtctgcaaatagtcttcttgaactaccctaattggaatgtgcaatctatttcttgctgagaccctgattgatacagaattttagagattatgtagtacaaccttcacattttatgaagagaaaaccacggtatagagagtaagtgcctgcttgaagcaactgctaagtggcagagcctgaactctgaaggtgcaccggactgacctcttgtctggagatcctccaacataaccctagtgtggaaagactagtgagtggcacaacattagttggagtaggcatttattttatttttaacttttttgtggagcatcgtaactgggccaaagcttgtttgcttgcctttttttttttttttttctgagacagggtctcactttgtcacccaggctggagtgcagtggtgccatcttggcttactgctgcctccatctcccgggcttaagcgatcctcccacctcagccctccaagtacctgggactacaagcacgcaccaccacacctggtaaatatttttgtattttttgtagagatggggtttcatcatgttgcccaggctggtctcaaactcctgggcacaagctatctgctacatcggcctcccaaagtgctagaattacaggcgtgagccactgcgcctggctggccaaatctttctatagtgacttttgcccacgttattgctcagctgtacttaggcaacttttcagctatgacttttgccttttcttaggtgttccagaataaaaaattccatgaatgggcttctgtgtttcatctggttacaaatttagaagctgtgtaagcaagtggtttgtgtgtgagtgtaattaatgccttcaggtaaatggtttttgttctttaataattgcagagtattcatcagtttaataacacccatgaaccaaaatggcagtgaatcaggatcttcttcaaaggaagactgttgttacagtttattggtaacaattattgaatggtattcaagtttggattactgaggttcgctattggtgggtatactggcacaagataaacagtcaataaatatttgtcaaattttaggattgttttctctattactgtgagaaatgtcattggtgttttgatatggattgcattgaatctgtagatttctttggttaatatggacattttaacaatattgattcttccaatccatgaacatgaaacattttaactttttttgtatgtgttctcttcaatttctttcacttctttggttaattcctaggtatttaattttatttgtagctattgtaaatgggattacttgatttctttttcaggttgttttctgttggcatatagaaatgctactgatttctgtatattgattttgtatgttgaaacattactgagtttatcagttcagatagttttttgttttgcgtgtggagttttcaggtttttccaaatgtaagttcatatcatctgcaaacaaggacagtttgacttctttgcaatttgaatgcctcttatatctttctcttgtctgattgctctagctaggacttccagtactgtgttgaataacagtggcaaaaagtggggatccttcacagggaggggaacatcacacaccagggcctgtcagggtggggggctaggggagggatagcattaggagactaatgtaggtgacaggttgaagggtgcagcaaaccaccatggcacgtgtatacctatgtaacaaaactgcatgtttttcacatgtatcccagaacttaaagtataaaaaaaaaatgatttgacaaccccaaaaaaagaaaagtggggatccttatcgtgttctagatcttagagaaaaggttttcacttgttccccattcagtatcatactagctgtgggtctgtcatatattgtttttattatttaggtatgttccttctacactcagttttttgagggtttttatcatgctgagggatcctgaattttatcaaatgtctttttcagcatcagctgaaatgatatatgggttttgtccttcattctgctaatataatgtatcacattggttgatttacatatgttgaactatgcttgcatacctgggataaatcccacttggtcatgatgaatgatctttttagtatgttgttgaatttggtttgcaagatttttttgaggatttttgcttcaatattcatcagggatattagcctgtactttttttttctttctttctttcttttttttaaattttcaaccccctgagacttctacatcctatctagttttcttattttttggatgcgttttcatctggtgttggcatcagggtaatactgtcctcataaaatgagtttagaagtattctatttttcagaatagttttagtaggattgatttttttaaaaatgttttgtgaaatgaagcagtgaagccattgggtcctgggcttttctttgctgggagattctttattacagcttctatctcattacttgttatcggtatgttcaaattttggatttctttatggttcaatcttggtaagttgtatgtgtctaagaatttatccatttcttctaggttttccaatttagtggcatattaagcctctcataatcctttgagtttctgcagtatcagttataatgcctttctttttcatctctgattttatttatttgggtcttctctatttttccttagtttggctaaaggtttgtcaagtttgtttatgttttcagaaaaccaagatttcattttgttggtcttttgcatggttttcttcatttcaatttcatttatttctgctctgatatttattatttgtctactgattttaggttctgtttgctcttgattttccagttctttaagatgtattgttaggttgattacttgatgtctttctactttttttatgtaggcacttataactataaacttctctcttattactgctttcactatatcccacaggttttgatatgttgtgtttccattatcatttgtttcgataaattttttgatttgcttcttaatttcttcattgacaactggtcattcaggagtgtattatttaatttccgtgtgtttgtgtggtttccaagattttgcttgttattcatttcttgttttattccattgtggtcagagaagatacttattctttcagtttttttgaatgtgttaagacttgttttgtgtcctaatatatggtctatccttgagaatgatccatgtgctgagaagattgtgttctccagccattggatgaaatattctgtaaatatctgttaggtcaatttggtccatggtgcagattaagttctttgttggttttctttctgggtgatctgtccaatgctgaaagtggggtgttgaggtctcctgctatcattgtattggggtttatctctctgtttagctctaacattttctttatatatctgggtactccggtgttgggtagatatgtatttacaattgttatatcctcttgcagaattgacccttttatcattatacaatgaccttctttgtctctttttatgatttttgtcttgaattctattttgtctgataaaagtatagctactcttcctctttttggttttcacttgcttagaaagtctttttccattcttttttttcagtttatgtgtgtctttataggtgaagtatgttagtgtgtttttagtaggcaacagaacactgggtctgttttttaaaaatccattcagccactttgtcttttttgactaatttttggtttaatttttatttttagtagagacatggtctcactttgttgcccaggctggtctcaaattcctgtgctctagcaatcctccacccttggcctcccaaagtgctgagattccaagtgtgagccaacatacccagcctactctgtgtcttttcattggagagtttagtccatttacattcattgttgttattaataagtaaggacttacttcagccattttttatttattttctggttgttttgtgttcttctcttccttctttccttcctttctgtcttccttttagtaaaggttattttctctagtggtatggttgaatttgtttctttttattttttgcatatttgtggtatgttttgttttgttttgttttgaagttactatgaggcttgcaaataataatttatagcccagtattttattcatttatttattttattattattattatttttattttttgagatggagtctcgctgtgtcacccaggctggagtgcagtggcatgatcttgactcactgcaagctccgcctcctgggttcatgccattctcctgcctcagcctcccgagcagctgggaccacaggcacccgccaccacacctggctaattttttgtatttttagtagagatggggtttcaccatgttagccaggatggtctcgatctcctgagctcgtgatccgcccgcctcagcctcccaaagtgctgggattaccccagtattttaaacttatgacaacttaacactgattgcataaacaagcaataagtaataaaaactctacacttcaccttcatcctcttgcttttaaactttttgttgtttctatttatatcttatagtactgtctgtgccttaaaattattatttttatcagttcatcttttagtctttccactcaagaggtgagtagttaacataccacaattacagtgttattatattttgtgtttttctgtttacttattattatcagtgagttttataccttcagatgatttcttattgctcatttacttcctttactttcagactgaaaaaattccgtttacttgtaggacaggtctgctgttgataaaatacctcagcatttgtttgtctgggcaagtctttatttctccttcatgtttgaaggatattttcaccagatatattattctagggtaaaagtttttttttctttagtattttaaatatgtatgccactctttcctggcctgtaaggtttccactgaaaagtctgctgccagacatattagagctcatagtatgttgtttcttttctcttgctactttcaggatcttttctttatcttcgacctttgggagtttattaaatgctttgatgtagtcttctttgggttaaatctgcttggcattctttaatcttcttttacttggatattgatagctttctctaggtttgtcaagttctctgttatccctttgaataaactttcaatccctatctctctctccacttcctctttaaggccagtgactcttaaacttgcccctttcatgctattttctagtcttgtaggtgtgcttcattttttaaattcttttttcattttgtcttctctgactgtgtatttccaaatagcctgtcttcaagctcactaattctttctgatacttggtcagttctgctattaagagactttgatgcattcttcagtatgtcaatttcatttttcaactctagaatttgtttgattttttcaaattatgaattcctttgttatatttatctgataagatcccaaattccttctctgtgttatcttaaatttcattgagttttctcaaaactgctattttgaattctctgtctgaaaggtcacatatctccatctctctgggattggctcctggtgacttatttagtttatttttgagatcatattttcctgggtgatcttgatgcttgtggatatttgttggtgtttgtgcattgaagagttaggtatttattgtagtcttctcaggctgggcttgtttgtacccatccttcttaggaaggtttttcaggtatttgaagggacttggatgttgtgatctaagtttttggtcactgccgccatgtctgcattaggcggcagccttatagaggtataagcctgcagactcatagaggtacaagcctgcagactcatagaggtactgccttggtggttgtggatgagatcctgaagaattctctggattgccaggcagagactgtcatattcttgccttactttctcctaaacaaatggagcttctctctctgtgttgagttgcctggagctgggaaaggggttatataagtagccctgtattcaccaccactgggactgccctgggtcaaaacactgagtcttgcccaaggcccattgtaaccactacctggctactgcctgtattcactcaaggccctagggctctacagccagcaggtggtaaagccagccagccttccccttcagggagtggagttccccagggccccagatgggcccagaaaagccacccaggagccaggacctgaagtcagaaaccaaagaaatctgtgctggtgccacaaggcaatgtctttcccaatagtccctcccccttccacaagaagaggggtctctccccatagccaccattaccccaggcccatgaggaatactgccaggctaccactgatgttcacttaaggcccaggagcttttcagtcagcttgtggtgaatgtttccaggattgggactcacccttcagggaaatatgttcccctctggcccaggacaggtccagaaatccaagagccaaggcctggaattagggaacaccaagggcctgcttggtgctctacccagctgtggccaaactggtatctaagctgcaagactaagtcccctttactcttttttctgcttttcccaagaaggaatccctccccttggctaccacagctgggaatgtgctgggtcacacctgaagccagtacatctcagagtctcatccaaggctcacagtgtgtactacctagataccactgctgattattcagggctcaaaggctctttagtcaggaggttattaatcctgcaaggactacatcctttccttcaagacagtgttttcccttctgacccaatgtgtgtctggaaatgtcatctgggcactaggaaatggaatggggacctcagaactctgtttggtaccctatcctgttgtggctcagctgatatccaaattgcaagacaactctttgctcttcgctctcctctccttaagtggaaggaaggaatcttgttcagagctgcaagctgcactgcctgggattgggggatggttagtacaagccctcctgtgttactctgtgatcacactgctataaagaactacctgagactcagtaatttatgaagaaaaggggtttaattgactcacaattctgaaggctctacaggaggcatggcttgggagacctcaggaaacttaaaatcatggcagaagacaaaggggaagcaagcatgtcttccccatggccagcaggaaaaagagagtgaaaggggaggtgctacacactttcaaacaactggatctcatgagaactctatcatgagaacagcaagggggattttcacccccataattgaatcaactcccaccaggcttctcttccagcattgaagattgtaggtcattatgagatttgggtggggacacagagccaaactctatcattctgctcctggccccttccaaatctcatgtccttctcacatttcaaaacaatcatgccttcccaacagtcccccagagtcttaactcattccagcatcaactcaaaagtccaagtccaaagtctcatgtgaaacaaggcaagtcccttccactatgagcctgtaaaattaagaacaaattagttacttctaagatactgtgatagtacagacaatgggtaaatgctcccattccaagcgggagaaatcagccgaaacaaataggctctatgcaagtctgaaacccagcagggcagtcattacatcttaaagctccaaaataatattctttgactccatgtctcatttgtaggccatactgacacaagggatgggctcccaaggccttgggcagctccacccctgtgtatctgcagggtatagccccctcggctgcttttatgggctggtgttgagagcctgcagcttttccaggtgcatggtgcaagctgttggtagattctggggtctggaggacagtggccctcttctaacagctccacgaggcagtgccccagtggggattctgtgtaggtactctaactccacatttccccatacacactgccctagaaggggttctccatgagggctttgcccctgcagtagacttctgcctgcacatccaggcatttccatacatcatctgagatctaggtggaggctcccaagcctcatctcttgccttctgtgcacccacaggcttaataccacatggaagccttggtggcttctggcttgcaccctctggaacagtggcctgaactgtaccttggcctcttttagatgtggctccatggctggagcagagtagctaggacaccaggtgacatgtctcgaggctgcacagagcagcaggttcctggtcctggcccatgaaaccattcttccctcccagcctccaggcctgtgatgggaggggctgctgttaaagtctctgaaatgccctaggggcatattccccattgtcttggctattaacatcaggctcttctttacttatgcaaattgctgcaaccaactcaaattccttccctgaaaatgggcttttcttttctgccatatggccagactacaaattttccaaacttttatgctctgcttcccttttaaacataagttccagtttcagatcatctctttgcttatgaatacaagcatatgctgttagaagcagccaggccatgtcttgaatgctttgctgcttagaaatttcttctgccagataccctcaatcatctttctcaagctcaaagttccacagatctctagggcaggggtaggcacaatgctgccagtctcttttctaaagcatggcaagtgtgacctttacttcagttcctaataagttcctcatctccatctgagacttcagcctggactttattctttatatcactttcagcattttggtcacaacaatttaacaagtctctaggaagttccaaactttcctaccatctttctgtcttcttctgatcccttcaaactgttctaaactctgcctattacccagttccaaagctgcttccacattttcaggtatatttatagcaatgccccactcctggtaccaattttatgtattagtttgtgattacactgctataaagaactacctgagactcggtaatttatgcagaaaagaggtttaattgactcacagttccaaaggctgtacaggaggcatggctggggaggcctcaggaaacttaaaatcatggcagaaagtaaagggaatcaagcatgtctttcccattgccagcaggagagagagagagagtgaagggggaggtgctatatactttcaaacaaccagatctcatgagaaccctaccacaagaatagcaacggggaagtccaccctcatgattcagtcacctcccaccaggccctttctccaacactgaagattacaattcaacatgagatttgggtggggacacctaacatcaaaccacgtcaattcccttggctgtactggttggtgtctcactaggtcatgtgtccccgaagtccactggccttgaacccagcacagcactaggaattgccttggagttgcagtccttgtgacctagactgcctttctaatttgtttaagaccccagagcaccttagcctgcagtggcaaggcttgctggaactcaagttctaactgctggcagggacaattcccctttggctagggttggtttaaatgctccctccatttatttcagctgagttctggccagggttgcttttcactgtgacagacagcactgagttccaatgcaaagtcccacaatcactgtgctctttctcccccaagtgcacggattctctatgctttggggctgctgctgggggttggggaagggatggcatcagcaattcaagattgtctttcctaccctcttcagtgcctctttcagtgatatgaagttaaaatcaggcactgtgattactcacttaatgtttggttcttatgaaggtgcttgtgtgtgtgtgtgtgtgtgcatgtgtgtgtgtgtttgtgtgagtgtgtagatagctgttaaacttgatatttcttcagggaggatgattggtggaagcttgtattcatccattttgttccacctcctgctactctgtgactttcttatgagatataacacataattttattccacatgagcctcaatttccacattgtaaaactgggttgataataccttcctcatagggttttttgatggttaagtttttaaaaatgtatatgctagagagctttttaaaaataagttgtaaagagattatagacagtccccaacttaggatggttccacttactatttttcaactttttagtggttcaaaagcaatatacatttagtacctcctcatcttatgatggggttctgtctgggtaaatgctttgtaagcccatcataagccaaggaacatctgtgttgcctttactgtagtgctaggatgttacaattgtcctttcaatggacagactcagtgggactgtcttgtaggacctatgttgacgttttgttctgtgtacagtactagttcagctgcttgggatcttcttcctgtatgtataaaactcatttttagttcttttgattccaaagggttaactcaagaaaattactagaaggcacatttcttacagcaggtatccccctttgtaaatcaggatgtctgggagtgtccagatctttgcactaagcactaatggtggtctgaagttatgttcaacaactcttcccatgaaaacttttctccccaaaacttctgaacaccgtgttcagattcttctttctcgtccctacttccctgccaacaacaactaaataaaaagaaaatcaaaaagccatcactcctttaaattaccaggggaccacctaaaaatctttattatttcattatgcagaacagtttatctcttttcagcctgactcaactgtcagactagcctagagccatccctttcacagcctaaagactgtgccataccaaacaaaagactgacttattcccccaggggtgaattctgtgcttccccagaatgcagaagcagcttgtgcaagaatttctttctttttttaaatagattttccttcctgataaatgtagatatggttatgattaataaaatgcaaatttacttaagagcatttaagctattatagtagctttttgtcattctgtatttttttcaatcaactgatactaaaataaaatcactactaaatgtgggttacaaaaatgttttgacatttaaaagatgttctttttttttttttaagatgggaatctctgggataagccttttagtttgtgaaacacttcttaaactccacccttcctcaaagctagtgggaagctagctgatgccaatctgaatgattcctggtctggggtctgtggtggtatttgtgtttcttattgcaaggttttgttctaaggaatgaggctgaactaaatccagtgtcagagaaaaagtgatctcagaaaccaagaggacaattagaagtgagttggccccggaaatagaaaccaactatcaggcaaagccttcgtgaggcaatttggggttgtaacactacattacctacaaatcaatggatattttaggagaaattaaaaagggatgacgtactctgttcaaaaaaaaggtttgaaacccagcagattcctgtgggctttgcatccccagccctaggcatctctgtttaaagaggcagcttagtgataagggaggaggagagaatttctaagaaggggtagaagtgtagacttatatttatatatatttttaaaaagtttttattgtttagcagcttcagtaaggtataatttcaagatcataaaattacccagggtaagtgggtatagataagtatataggtcatttattttgagtgaatttttagagttttgtatctatcaacacaattcagttttagaacattttttaatatctcttacttcattttgggttgctgtaacagtacctgagactggctaatttatgtgtattagtctattctcacactgctataaagaattacctgaggctgggtaatttataaagaaagcaagtttaattggctcatgggtccacaggctgtacaggatgcatggctggggaggcctcaggaaactttcaatcatggtagaaggtgaagtaggcatgtcttaacacggctggagcaggaggaagagagagatgggggaagtgctgcatacctttaaacaaccagatctcatgagaattcactgactatcatgagaacagcaagggaggaagtctgcctccatgatccagttaccttccaccaggccttttctccaacactggggattataattcgacctgagatttgggtgggaacacaaatccaatctataccttttaaactctagaagtttatttagttcatggttctggaggctgggaagttgaagaacatggtgccagcatctagtgggggcctttgtgctgaatcattccatggcagatggtggaagaataagagagtgtgaggccaagagagtgtgagaacatgagaggaagcaggggccaaactcactttttttctttttttgagatggagtctcactgtgttgctcaggctggagtgcaatggtgcgatctcggctcactgcaacctccacctcctgggttcaagcaattcttctgcctcagcttcccaagcagctggcattacaggtgtgcactatcatgcccagctaatttttgtgttttcagtagagacaggatttcaccatgttggccaggctggccttgaactcctgacctcagcatcagcatcccaaagtgctggaattacaggcctgagccactgcaccagttgcaaactcacttttatatcaagaccactcttgtgataacagtgttacattaatgagtgcagaacaatgttacgttaataaaggcagggccctcaatgacccaaacacctcccatttggccccacctgccaccatggttgcgttggggattaagattccaacatatgaacacatttaaaccacagcaacccccaaaagttcccagtgctcttttatagtctatacccacttctgtcctctagttccaggcaaccattcactttctgtctatagatttgccttttctataaatagactcataaaatatgtattcttttgtgtatatcttctttcactttacatagttttgaggttcatggatattgcagtgtatatcagtagctcattttgttttctgaatagattgttttatgagtatagcatattttgtttattctttcaacagttgaaagacattttgaaatgtttccactttcttgctattatgactagttatattatgaacatttatataccggtttttctgtggactgacaaccgaaatgagtgattaaggcacaagtctcaaatcattgaggtttattgagccaccttaagggcttgcccaggaaaatcttgagtcacagaagcacctatgactttttccaaagaggttctcaggaagtttagtgttttacattttccttaaaaagggtgggggatggggcagcagtgagacaaattattacatacttatgagagtttagttagtgcccagtaaatctacatcttacataagataaggtgaacatttgaagaaaatgggaatagaggaaacatatgtctcagggaagggtgaaggaatgattaatctcatcttaccttagggaggggtgaaagcatgtttaatcttgtctttgttgtgtccctgtgaagataagctagtagtcttttgaaaggactagtttctttttagctcttagggaggaaagcctgatggctcccctgaaggtgggagtatcaggaagtgtgtccaacttcccatttcaccatggctgtgaactcagcttttcaggtttctctggggtttccttggccaagaggaggtgtgttcagtctgttggatgtttagaattgtttttatttctcatttttcccccttttggctaagattggccagaggcagcatcagtggccacactttcattttgtcccatgttgttgctgaggtggtatggctatctgcttcaggtccgtcctgtcccttggtggggcccttgtggccaagagacatagagccaaaaaacttaacagccaatttaagtgttctaggccagatggcatagagggcaggcactcatcaatgtttaaaaccttttatgcaataaaagagctaaaaaccaaagccaaaaggccaggttatttgtagggtctgaattaattatatccctgaaaaccagacctaacagtttcatgtgcccgcttcttccatgatagtccccgggcttagagggagggtgcttgtatagttttagcagcaggggattggcaaggagaaacagatcaggcccggtgggatatcaaattagggagattcataggctcttaaatcatctgtagttttcaaaacaccgcaacttcagttttctcagacgaagtgaaacaatggggaaataaataacattaatcatttgacaaaagagaatttatatgtcagaatggaagaggaacttattccatgagagagctaactaaaaacatcatgaagaaaattataactaggttcttttttagagacccactgcagaaaaataataattcaaaacaaaagtcacagctggaatccaataataattgtgttatagttttcctttgaaatagaatttctctctctctaatctctccttttttactaaaaagaaatgatagtatggccaatttatgtgcaaaataagtttcaggaatactcacagatagtttccaaattttggagaactcagagaggtatattctgctcacaaaagtatgctttacaatcagagtagcagccttccaagcaggacattgtcctttcatcttggagctaccatccacaaaccaagcagctctttatcagtcaggtgagagctatttattgggtaatgtaaaatccaggagctcctcgcatagcttcagacgcagtcctagggagaaagtagctctttgctcatgagtatctcctcgttgtacactccagatggcatcatcctatataaaccatttccattttattagggaaccctgggcacttcaatggggcactgctatccctgttagcatagggatagcttcacttaatgtcccttagcaaggcagtaaatgctcctcaagtggaaattctcttaaagtctcagtaatcatcattgggaagtgctcacagacttttgccaaaacctgcaataaatgctctacaaagggctatcaaagtacagaatttgttcccaccagcattctagcttttactctccactctgtgggcttgggcaatcttactggttctcatttagcatgtccattttttttttcttcaacttttaagttcaggagtacatatgcaggatgtgcaggtttgttacgtaggtaaacgtgtgccatgatggccagttgcacatatcatcccgtcacccaggtgtcaagcccagtgttcattagctattcttcccaatgctctccctcaggccccccacaaaaggccccagcatgtgttgttctcctgcccgcacatgtccatttaatattgcctgaggggcgcatttacatcctttctgttttatagtactaggtaggggaaacctctcccagtcagatacaagatccatttttataaacatttaggtaaagaagacacaatcactttagaaaatgcctgtttaaacattccaacttttgcctgtaatccaagcactttgggaggctgaggcaggtggatcgcctgaggtcaggagttcaagaccagcctggccaacacggtgaaaccctgtctctactaaaaatacaaaaattagctaggtgaggtggtgggcgcctgtactcccagctactcatgaggctgaggcaggagaattggttgaacctaagaggcagaggttgcggtgagccgagatcgcaccaccgcacttcagcctgggcaacagagtgagactacatctcaaaaaaaacaaaacaaaaaaaaaaacaaaaaaaaaatccaacttttgcaatcctgcatttttacattctggtcccagaaacttcttttatgaccgttttaccctttcttttgaaaaggacctgggttcccagcaggaggttgagccaagggacttaggcccttttgtcaatccatatcttggttcacctgcctcactatgccccaggcaattattggccagctttctcattgtaatctttgtcttttgactttttaaaaaaatttctccaatctagggtaaagggaataaaaaggtttggggccctttaatgctggggaactagcaaaatccctttggtccatccagcccttggtaatgttgtactaagacctttgttttaaccccatcagtttctattttattcgtttaatttcttaataaccatctaaagacttctactaccctgatgggatgaatcccatgtttctctctcatttcttctctgagtttcattgtttttctatcattgttttctttcttcaccttattttttagaataaccatttaaaaatttccaccttcctggaatgagtcctttgactctcccttttgcttttccccatgctcttcttaattactttaatgtattattagcatctgtaagacccatgaggggaagctgaaacagccaatttgctacggcttctcgtgttgttctggacaacagtaggagtagcattacatagggtgcccatttggaaggagcccctttagcccctataaccacagcatttatcatgaactaggtaatgggcatatttagtgggtgaatattcctatcatcataaagtgagtccctcatggcttgtagatgaagcacatcagcagctgcatctggcgtgctccacttggcattactaagtagagttggatagttccccttcttagggcttttatccagtccactaggctagctatgaaacagcaccattgtctggagtaaatacctgaggtttgtcatctcatgccaaggaaatcaattaagtggtcacaagaagtgggtttaggagcggaggtttaataggctaaagaaagagaaaggagaacagctctctctcttgcgaaagagaggggcacctgaatgggacttctggcccactgtggagtgtaccggattttatagacaggcttgaggaggctatgactgatttacatagggcccatagattggttggaccaggtgcgatgtttacatagctggtgaggaagctggtcgtcccaccctaatcttattaggcaaatggagtctttgcctggccagcgccatgctgtcttttccttactgtacatgtggtttggcaaggagaagggaagatggagatgccattttgaacctgcctagccccaggtagccatttcctattggcacagctgctggcattcacccttgcaagcttctagcttgtgtgtctatgtctgcagcttgattttacaggttgctctttgttagaaaagaaatgattttggggctgcttttcattgaaaggaaaaccttaccaaggactcccgaaccctcactatctaaataatttcttttttttttttttgacacggagtctcactccatgacccaggctggggtgcagtggcatgatctttgctcactgcaacctctgccacccgcgttcaagcgaccctgtggcctcagcctccccagtagctgggactacaggcgtgtgctaccatgcttggctaatttttatatttttggtagagatggggtttcaccatgttggccaggctggtcttgacctcctgacctcaggtgatcggcccgcctcggcctcccaaagtgctggtattataggtttcatgcgcgtccgtgtgaagagaccaccaaacaggctttgtgtgagcaatacagcttttaatcacctgggtgcaggcgggctaagtctgaaaagagagtcagcaaagggagataggggtggggccgttttataagatttgggtaggtaaaggaaaatgacagtcaaagggggtttgttctctggcgggcaggagtgggggttgcaaggtgctcagtgggggaggtttttgagccaggatgagccaggaaaaggaatttcacaagacaatgtcatcagttaaggcaggaacaggccattttcacttcttttgtggtggaatgtcatcagttaaggcggggcagggcatattcacttcttttgtgattcttcagttacttcaggccatctgggcgaatatgtgcaagtcacaggggatgcgatggcttggcttgggctcagaggcctgacattcctgccttcttatattaataagaaaaataaaacaaaatagtgttgaagtgttggggtggcgaaaatttttggggggtggtatggagagagagaatgggcgatgtttctcagggctgcttcgagcaggattggggtggcttgggaacctagagtgggagagattaagctgaaggaagattttgtggtaaggggtgatattgtggggttgttagaagaaacatttgttgtatagaatgattggtgatggcctggatatggttttgtatgaattgaaaaactaaatggaataagagaaggagaaaaacaggtataaaaggtctaagaattgggaggacccaggacatctgattagagagtgcctaaggagattcagcatagtcctgccagcaaagattatttatttacttcaagagttaagagtggcagtttggggatagcaccaggagatatcagctgtgatggcttggagaaacagtgtaaaccggcagtgtaaacaagagcagggcatgtatgagtagctgagaatggtgaataggagtatgactagacagaagatagtagggatgacaagtttttttggggcacagtctaagttggtctggtgtctggaatgagactggggcctaataaaaaggagcgtctatacaggagctcaaatgggctgtaccctgtagcattctgaggacaggtctgacttctgagaagggaaagtggtaaaagtattgtccagtcctttttaagttggtggctgagcttggtgaggtgtgtttttaaaagacctttagtctgttctacttttcctgaagacagaggactgtaagggatgtaaaggtttcactgaatactaagagcctgaaaaactacttggctgatttgactaataaaggctggtctgttatcagactgtatagaggtgggaaggctaaactaaggaattatgtctgacagaagggaggaaatgactacggtggccttctcagaccctgtaggaaaggcctttacttattcagtgaaagtgtctacttagaataagaggtattttagtttcctgactcggggcatgttgagtaaagctaatttgccagtcctgggcgggggcaaatccctgaacttgatgtgtagggaagagagggggcctgaataatccctgaggagtagtagcatagcagatggaatactgagaagttatttcctcgaggatagatttccacaatggaaaggaaatgagaggttctaagaggcgggctagtggcttgtactatagcatagcctgcctttgctggtgtgtggcgattacgcctggtggaactgccatcaataaactaagtgtgatcagggtgagaaacaggggagaaggaaatgtggggaaatggggtgaacgtcaggtggatcagagagatgaaggagctggggagcagaaagtataggcatcaggtgtgaggaagaaaatagattttggaaattatgagagctgtagagagtgagttgagcatagtttgtgattttaagggcctctgaaagtattggggtggcagcagccactgcccggagacatgatggccagcctaaaacagtaaggtcaagttgtttggacaaaaaggctacaggacgcgatcccggtccttgtgtaagaattccgactgcacagccctgcacttcagctctgtgtaatgaaaagggttgggatgagtcagggagcgctcgggtgggggcagtctctaaagctgtcttcaaggaacggaaaaaggagtggggaaaggatttaggatctatggggtcagctaggtttctttttgtgagtttatataatggttttgttaggatggcaaaaccaggtatctaaagtcgaaagtatctaaccatgcctaggatgtagaaggtgttggggtttgagagatcagtcagacacgatcggcagagagagcacatgtgtttttctaagaattacgccgagacaggtaacagatgaggaagaaatttgggcttgactgaagtaatgggggatgtctgttaagccttgcggcagtacagcccaggtaatttgctgagcgtgatgggtgtcagggtcagtccaagtgaaagcgaagagaggctgggatgaagggtgcaaaggaatagtaaagaaagcgtgtttgagatctagaacagaataatgggttgtagagggaggtattgaggataggagagtatatgggttcagcaccatggggtggataggcaaaacaatttggttgataaggcacagatcctgaactaacttgtaaggcttgtctggttttaggacaggtaaaatgggggaattgtaaggagagtttataggctttaaaaggccatgctgtagcaggcgagtgataacaggctttaatctttttaaagcgtgctgtgggatgggatactggcgttgagtggggtaagggtgattagattttaatgagatggtaagggttgcatgatcggtcaccaagaagggagtagaagtatcctatacttgtgggttaaggtggggggatacaagaggaggatgtgaaggaggctttgaagtgggggaaaaggtggcaatgagatgtggctgtagcccaggaatagtcagggaagcagataatttagttaaagtgtcttggcctaataagggaactgggcaggtggggataactaaaaaggagtgcttaaaagagtattgtctaaggtggcaccagagttggggagttttaagaggtttagaaacctggccgtcaatacccacaacagttatggaggcaagggaaacaggcccttgaaaaggaggtaatgtggagtgggtagcctccgtattcattaagaaggggacggacttaccttccactgtgaaggttacccgaagctcggagtccgtgatggtctagggggcttccgaggtgatcaggcagtgtcagtcttcagccgctaagccaagaagatctgggaagcagtcagagagccttgggccagagttccaggggctctgggagtggctgccaggtgagttggacagtccgatttccagtggggtcctgcacagatgggacgtgacttaggaggaatcctgggctgcaggcattccttggcctggtggccagatttctggcacttgtagcaagctcctgacagaggaggttctggaggaacgcctggccgctgcggttcaggcatttggaagttcttgtgtgctggagttgtggctggggtttgtctcacagtggaggcaaggaattgcaacttttttctattattgtacaccttgaaggcgaggttaattaatcccgttgtggggtttgagggccagaatttaatttttggagttttatttaatgttgggagcagattgggtaataaaatgtattttgagaataagacagccttttgatgttttagggtctagggctgtaaagagtctcagggttgctgccaaacgagtcatgaactgggctggatttttatatttgatgaaaaagagcctaaacgctatctgatttgggataaagaaaaaggagcattaaccttgactatgtctttagctccagccacctttttaagagtaaattgctaggcaggtggcagagggctagttacggaatgaaactgtaagccagaccgggtgtcaggaggggaggtgataaaaggattatagggtggagaagagggggctgaggaagaattgggacttagctcggcctggcgaggaggggagaggtcagatagatctgtagaaaaggaagattggagactcagtgatgcttggggttgggactgaggggacaggcgggagggaaagaaggaagatttgggacgagttgcattgggaacagagactaggaagggactgatgtgtaaaagaatgcctggacgtcaggcacctcagaccgtttgcctattttacgacaagaattatttatatcttgtaggatggaaaaattgaaagtgccattttctggctatttggtaccactgttgagtttgtattggggtcaagtggcattgcagaagaaagtaaggcatttaggttttaggtcaggtgtgagttgaagaggttttaagtttttgagaacacaggctaagggagaagaaggaggaatggagggtggaaggttgcccatagtgaaggaagcaagcccagagaaaagatagagacaggagggaaggggttcaggggttcttaccctccagaaaagtgggaaaggggtcggggcgcagagatacaaggtcggggcatggaaataagggatcagggcgcagagatataacaggttggggcgtggaaataagggatcggagcacagagatataagaggtcggggcatggacataagggatcggggcgcagagatacaaggttggggtacttgcccctcccccagaaaagcaggacttgccgctaaggatgaaggagaaggggttgggagtttcttgccccccagaaaggcggagaagaggtagagacatggagagaaggggttggggtacttgcccctcctctagaaaagcgggacttgctgctaagagtgaaggagaagggttaggggtttcttgccccccagaaaggtggagacggggtagagacacagagagaaggggttggggtacttgccccccccagaaaagtgggacttgccgctaagggtgaaggaccaaggcaggcgtccctgcgtgatctgacacctctgaaacgtgggtgaataatcagagaggcgtatctgcaattattaaacaccaagggaaggctgccttcccagtctgtgaccggcgccggggttttgggtccacggataaaacatgtctcctttgtctctaccagaaaatgaaaggaattgaaattgaaagaagggagagattgaagagtggaaaggagaaagtggttgagggatagtgagagaggttgaagaagagagtaagaagaggccgcttactcgatttaaaattggtgagatgttccttgggctggtgggtctgaggacctgaggtcgtaggtggatctttttcacggagcaaagaacaggaggacaggggattgatctcccaagggaggtcccccgatctgagtcacggcaccaaatttcatgcgcgtccgtgtgaagagaccaccaaacaggctttgtgtgagcaatacagcttttaatcacctgggtgcctgcgggctgagtccgaaaagagagtcagcaaagggagataggggtggggccgttttataatatttgggtaggtaaaggaaaattacagtcaaaggggttttgttctctggcgagcaggcgtaggggttgcaaggtgctcagtgggggaggtttttgagccaggatgagccaggaaaaggaatttcacaagacaatgtcatcagttaaggcaggaacaggccattttcacttcttttgtggtggaatgtcatcagttgaggtgaggcagggcatattcacttcttttgtgattcttcagttacttcaggccatctgggtgtgtacgtgcaagtgacaggggatgcgatggcttggcttgggctcagaggcctgacaataggtgtgatccaccgtgcccagcccaataatttctttctaacttctatatcagctgttctctaagaataccctcctgtcagtctgtatcacatttgcccatctgtgatttttcagtagtgagctgtgtgtcctgcatcaacctacacatcttttttccactctgtcgtatttaaaatgcaagatactactccaaaatcagtcactgttacaatccgttttagtaaaggttttttaggaagctgatgatactgatgtgcaaaatggaacagttcctttacattatgccctctggtttcagtagttaattggttttacccttccctcacattagctaccttcttggtaatcacaggtctcagaggtactttttgttgccccagtctatctttcccctttgcaggtggctttgaggctggtgatctgagatcagacagtccctcatcagaacttggtttggccaaggcccagcccagcacactcttttacttttgttttagctattatagataacaataaccaagggattgaatgtttctctttttccttattagtttgcatttcctcatgtatcttgtgaaccagttccccaggagctggatccattgctaaactccactggtaacttttacctttaggaactttttttttatttttttattttttaaatttttttattttgttttttttgagatggagtctcgctctgtcgcccaggctggagtgcagaggcgtgatctcggctcactacaagctccgcctcccgggttcacgccattctcctgcctcagcctcccaagtagctgagactacaggcgcccgccaccacgcccggctaattttttgtattttttagtagagacggggtttcaccgtgttggccaggacggtctcgatctcctgacctcgtgatccgcccacctcagcctcccaaagtgttgggattacaggcgtgagccaccgcgcccagcctacctttaggaacttaatacagcacagctgcagctccataccatggatgaccccgtcaagggttcctcattccctacccttttatcctttctctttctatccatttaattttatctgtctcattttttcttcattttgaagaaatctttatgtagcctccaaactagacaaatttactttttctttagcaaaaaaccacatcctcatgttatttataacctttaccaaaacgcatcttagtttctttatgaactctgcatgtagaattctcttatatctagtagttttaattatatttattaacaactattctaactaagtaaccctaatttacagtgaaaaacctgggattacctaatataacatgatctctagattttaaattactaaagaaattttacaactagttttacttatcaaagattcctaaagtctcatgagctaacaggcatttgggctagcatgttgttctgatatttgatttaagcacttaatttcctttaagcctattgattagagtgctttcataaaatttggtagtgaaacatcacatacacatgccacatagaaacatatagacacatagaagcagatcttacagagttataagatttttcatttgtcaggtttcaaaaaatttctctcccctaatttagagtatcaatctctttattacctgtttcataccttaaaacaattattagctaggcaactctacatttgcatctccaaacacatgactcttaggggagagaaagtagaaaatgcatacctcaaaggcacagaacttagaacaaaacaaaggcaagcaaggtttgttatgttaactttaagacactgtcttccctgtagttaaacttcctagcggtttaggtgcagagacagaggtgcatttacaaatgatgatttcctttaaagatgtaaatttctttcacaaagagattcaaagactgatttaatttaataggtgttctttttcaacttagcttgtgtgttatttagataactggcttcagggtggagtcctttaaggaacagggacaataaagcatgtggtttttagggcccaaaccatgcttttctcatccaaacatgcaaagaaatgagtagccccctatagtaatgaccatttcctgtaaataactgtcttcagccacccctaacattgtagctattgcccaactcaccagccagtgcacacaccaatgtcaagacctttcatagtacaaagtaatatctggtaccctgcaaaagctagagaccaggtaatgcaatataaaacagtgcagagttttagacctgagaggcatctgtctgcttacaactcttgggttttcataaggaaaaacaaaattttcctcccaacagaggagtctttgtcaacttttatgttttccccaaaagatcttagattgtcagaaattcctccccttcttttggtcccttctatgacattggaggttgcaagaggaaggaggaacagacaggattcagaaaaaataaataaataaaaatccccaagacaggatccaaaaagagaaacagcataaagctcttttaaaaaaaaattgtaattatagcttagatatcagcttttaatgaagctgactgctaacgatagaagtctttaaaagaaaaaaattctttcagatctcttattacctgggataaacagctgatatttctggcctttgaactcctttaccaaacctgaaggagtggggaggggtggtggctcgttttgctcagctgctgagctcaaacctcttgtgggagggggagcatgcaggtgagcaggtgcaggagctggggggagtgcctttaggcgctggcaggaatgaacccgtaccagcccatggcacattctagcagttgcccacaacctctggaaccccagagggcatgtgttacaaacaatgctcttttggtatttgctgtccaaagatggctaagtgttaactagctcagtggggagacatataccctgccctcttggtacccaggttcttgtctggtgtccaggaagaatcatgtcacacagactcgaaggatggtgaacgtggaggttttgttgagtgatggaggtggctctgagctgaaggggagctggaaaggggatggtgcgggaagaaggtgatctttccctgaagcccagccatctatgtctgggctcctctctgaagtcttgtcttctgaagttaagctgcatcttttcctagtctctgatgctcagttgctccttctcatctcaacattcagttgcttgttctcttttctccttctctgccacactgctctgctcctctgccagtggagcttggggtttttatggttataggttgggggcatagcaggcccaggtggttttggaaaaagcaacactcggtgggagaaacagggatgtgaagttctcatttagggccacaggcacaggcttgcaggtggaacccttgccagggactctgccctctcctacccagtattttcctgcctcctgttcgtaccattatggcttagccaagaacacacaaagtatctccaaagcagtgcaaagcagtcctcttaagatccagaattgttacagtaggtaggtagtcagacatgaccagggcaggatagggctcctctccccaacaccaggaatgtcaggcaaccatcagatgatggtcaggcggttgttaactctctctccaaaataataattggtcatagccagactcaggaaaaggcggtctcccgataaacagaaacacctgaaactggtgatcagcagcttcctgataagatctcaggagtggggcgagtgggttcaaccttgtgcatcaaatggcaaatagtggagtttaagtgatatttgacctcctagggatattcaactagtaagggaaaaacacctcaagtgagatgtgtacaactccagtaaacgtactgtgcatacacccttcccaagcgctggcaggctactgcgcatgtgaataccctaccccaagggaaagatcaggggagaagggacacaagaccctcatatgccaacatatcaaaccccaagtcaaaggtcgaatggcacacttgatctctcaagtcacctgcttggccctcttccaagtgtactttacttccttttattcctgctctaaagcttttaaataaacttttagtcttactctaagacttgctttggtatcttcttctcctttatacccctcagacaaattctttcttctgaggaggcaagaactgaggttgctttaggcccatatggatctgctgctggtaacagaatgacaccaaagacagcaaaaaaaaaaaaaaaaaaaaaaaggccacaaatggggtacaactcatttttgtctgtctggccatatactctatggtctcagtttctcagctggtcatctacacacaaaggcccaaaaccaccatatgcccccacagatggaagacaggaaatcaaaagctgtccatggaagggaaaaggatcaataagtggcaaaagtcatacaaatatcaaaccaaaaggactgattccatgatcatgaattttaactaccagactacaaagtggagcagcttccgttgttaatcccacatggaatcaaaagcaggcagtttgagtgtacaagggattttaactttgttttaggtcagattttgctctttaaagagaatttttaaggctagctataacgctattacggattcttttaaaaatttaacctttccatcaattgcttagaataagagatctctaaaatcttttttatttccaatagtgtacttagttccagtagtgactcaattcaaaagcctcttcatttaaagcccaggtggtaattttccaggtttttaccatatattcctggagagggcatagaggaagcaatccccgtgatcctccaaaattctctctcagaaatagacttaagccagcgaaagactgcaaaagccccggagggatggaacttttaagtcaaaactcctctcaagagcttgacacattcagaacagtgtgttacttaaaatattatgtgtcttggactcctagtcttttcagattggctggctggcctgaccctgaaaaatcatgccatctggatggcagagactagaaaagtaacccaagcacataaaacaagacaagagggaaaactcatccagtttccctctcaggagcccacagcgaagtttgtctaaacagacaccggtctagtcagaaccataaaatggactcatctgcagggctggcttgaacagcaggcttatagggattctaggcccatgttctctaccctatgacactgctctttatgagagaacaacacagaaagacaaaggaaaatggcaacaaaaaaggctatttctgagaggcaaggggtcaaacaatatgaacattcacaccataaagtaccaaaaatacaccagagtcactacaccccaagactagtcacacaaatcccttttttcccaataatcaaaactttgagacaaaacggtgatttttaaccatctgttcaatcagattgcacaaggaggccaggaggctcactgataagaatttcttacctatttgctggcttgtaagtttcctgagttctcttcattctgacttccaaaagagaagagtgattttggggatcctactggctatgccaaattgtgggggccaaggaggagctttccccttgaccctctgaagttttgctgaaaaattaactcacaaaaggcagattaatgggagaaaaagtatacaatttatttaatcatgtttacatgggaaccttcagaatgaagactcttagctaatctttcctagatccaaattagggaaggtctggctgggccactttataatatgtcaaataaatatattttggggggtaaaatattgatttcttttaaccagctggtgtttccggggttggagcttgactttctgcaactatggagttttagtcaacattgtggctgggaggaagagttggtcaaatctaatggaagatagactaaaaccaaaaaacagaaaaagtgatttcataatttacatatagttgagatctctgagcttaaggagaaattacagccagctggcaataaaccttgaccttcagctaccaaatcccaaaataaaaccccaaaccagctccttacctggagatggggcccacgctgaagactgctctccattggaagtgagcaaactccctttttagaggagttctgtggcaaaatgaaccttgggatctgaaatcaaaaatttcagatcagggaacctcaggagaagagagcagcttttgagcattggtgatgtgcacaatctgtcagagagaatctcttgccagcactgataggagaattgctgcgggtcaaaggggctgatctcttccctgagatcccgtcagagttaatgaaatgactgctaacatgagtgtgaggcataagtctcaaatcatggagctttattgagccaccctgagggcatgcccagaaaaaacagaagcttctatggttgtttttcacaaagaggttctcaggatatttagtatttatatatttttccttataaaggggaaagggtgggacagcagtgagacaaatgattacatacttgtgagagtttagttagtgcccagtaaatctacattttacgtaagataaggtgaatgtttgaagaaaaagagaatagagaaaacacgtctcaaggaggagtgaagaaagggttaatttcatctcggggggtgaaggaatgattaatctcatgttgtatttgttctgtacatgtgaagataaggtagtagtcttttgaaaggactagtttctatttagcccttggggaagaaagcctgatggctgttaggagggtgggagggtgggagtatagtaaggcgtggctaatctatcccttgtcactgtgactcagcttccaaggtttctctagggtttctttggccaagaggggttctattcagtcagttgggggcttagaattttattttcatttcttaggacattgttttatttttcttgggtagattaccatgagcagaattgctaatagatgtgtgtttgactttctaagaaaacggccaaacttttgtaagtggttgtacattctcaaatcaatgtatgggaattccagttttgttttcacattcacaccacactttgtcatgttagatgttttcattatagccactctagtgagtgtgtagaatttctgttgtcatttaaatttgtatttttcttcttattaatggtgttatcttagccaattgtgtaatttctttgatgagatatccatacacagtttacctccactttttaattggattgtttgtggctctattattgaattgtagcagttctttatatattctggatacaacctctttatcagatatatgatttggaggtattttttctcccatctgttattttttaaaaatcattacttaaaatactttcaacctctaagttttagtgtggtggggcaaagcaccaggtcatcaaagctagggataatacaatgtttaactatcaccactgaccagtcagaatggatttgggtcatagggtggatgatggaaaggtgggggaccctcaggagcttggaacagcagctgtttgccagcaagtttggaaatattatatttaaacaactggtaccattataccagtgtatatacctggtatgagatcagacttaaatctttgtcaagcaatttgaggggtacaggagatgatttgcggggagtcctagaagtatcagtgtggaagcacaaagaagaaaccagcctagaatctcaccagtggacagctggggctgttaggggttttgatctaatgcagacagataccgacacccagcaggctcaatgtatttctcaggagcattggctctcaccccaggcttttatgagaatcacctggggatctcttcattcattcattcattcattcattcattcattcattcattcatgcagagccggctgtgcgggaaacatgagttttattactcaaatcagtctcctggagcattcagggatcagagtttttaaggaaaatttggtgggtgtcagggtggggagcagtgagtcaaaggaggtctgattggttgggccagagatgaaatcacagggagttgaagccgtcttcttgcactgttagttcctggataggggctacaagatcagatgagccagtttatcaatctatatggtgccagctgatccattaagtgcagggtttgcaaaatatctcaggcactaatcttaggttttacaatagtgatgttatccccaggagcaatttggggagggtcagaatcttgtagcttccagctacatgactcctaaaccataatttctaatcttttgactaatttgttagctctacaaaggcggtctagttctcgggcaagaaggcggtttgttttgggaaagggctgttattatctttgtttcaaagtataaactataactaagttcctcccaaagttgattcagcctacacccaggaatgagcaaggacagcttggaggttagaagcaggatggagttggttaggtcagatctctgtcactttctcagttataattttgcagtggtagtttcagtcttactctgtcacccaggctggagtgcatgtatgatcacagctcactacagcctcaacctcctgggctaaagagatcctcccaccttggtccctgagttgctgggactcaggcatgtgccaccacacttggctaaatttttttagttttgtagagatgggggtttcagtatgttgcccaggttggccttgaactcttgggctcaagtgatcctccctccttggcctcccagcaccaggcatgagtcagtgtgtccagcctggggatatattaaaaagtacctatacctgggacccaacccagtccaatttaaccagactatctgcaagtggggcttaggctataggagtttttaaagctcctaggtgattctaatgacatctacttttgagaattcctgtggaaaacccaatattgctttgagtaggattgtacccagtcctgaatgagctacataacatgaagatagtattagcttttgcaaacatggcttcttctgctgcttgagaagaagtggagataaaacaacaactcccatttttttagccttctttaaagcatatgctgtggtttgaatgttccctccaaaactctgttgaaatttatttgccattttgatggtattaagaggtgggaccactaagaggtgattaggccatgagggatctaccctcatcagtgaattaataccattatagaaagagtggcctcctgataaaagtgagttccaccctgtcttgccctcttttaccctcttatgctctcttgcccttttgtctactgccatgaaatggtgcagcagaaaggctcttgccagatatgagtccctcagccttggacttcctagcctccagaattgttaagaaataaatgtattttctttataaatgatccagtctgtggtattctgttatagcaacacaaaatgaacaaagacagcatgtgacctcattgaattaaacagttatctaccctgataattcatttcttttttacatgtgaggagacagagactcagagccattgaacagtttactcaagatcacatagtccataaggggaagagtttcttttcagagaattagcatcatttatgtgaaagtcctggaaacctttagtattgtcttgtaaacaccttcccaaaatgcaaagaatggaaaagaggccttcaagttaccacaatgtatgaccctacagaataacattgaaactcttactttttgttcttagaatagtttttcatttagattatggctatttttgatacaattctaacaagtttgcttatctggtttcccagttgtcagattagaagcagaaaattagaaaagggagatgagttgctcacaatagacatattaaaacaggaatacattggagccagagcttcatggtggaggaagaaaatagtttccttctccgtaaaatgtgtgggttgaactggtctctgaggccccttccagctctaaaactcagtgtgtttaagataaaagctataaaaagcttcagaaaaacacataaaaatgaaaaaaacctagaaatttggacccagtgttggagaaataatcctagaaaatttggctgcttttgaggacatacctttatcatagacagtgcagtacttgatgtttgtgattatggcactgaatcatcaggagaagattaaaatttgtcggtttttttttttttttgagacggagtcttgctttgtcgcccaggctggagtgcagtggcatgatctcggctcactgcaagctccgccttgcaggtttacgccattctcctgcctcagcctcccgagtaactgggactacaggcgcctgccaccacatccggctaattttatttttgtatttttagtagagatggggtttcactgtgttagccgggatagtctcaatctcctgactttgtgatctgcctgcctcggcctcccatactgatgggattacagccgtgagcctagccttgtctgttttttaatcattttagagacagggtcttgctgtgtcacgcaggctggactctagtggcacaatcatagctcactgtaacctcaaactcctaggctcaagtgatccttccacattagcctccctagtagctgggacctacaggcacttgtcacgacacctggcttatttagagacagggtctggctatattgctcagggtgttctggaactcctggcctcaaagtgctgagattacaggtttgagccaccacacctggtctaaaatttgttttgtaagtgctgtttcagaattcaggaaagcacacaaattacttttgaaagatttcactcttttcaaccttttgttatttaaacatccataggttggaacatttgtgttgtggaacagtttccctgatacattcctcattgttttgtgggacttctgttccttgatagaataattcagttagttgtgacagtatcttgcatctatttattgcttgtcagccaaaaataaaatcctgagattcccccagccatctgaatggaaccctccctccttggccaagtgcatccaaagttaacctgaaaaaccagttcaggccatgataggaagggggaggttggacatgcctcattataccttcctcccttttggaattcaggaaaagctgaccagcattaacgtcaacacagataataagtctgattagaaacatttatacaatctattgtctctgaagcctgctacctggaggcttcatctgcgtgataaaaccttgctctctataactccttatgataacccagacgttcctttctattgataataaccctttcaaccaattgccaatcagaacatgttaaaatctgtctatgacgtggaaacacccctcaacccccacagatccctgcaagcttcaagttgtcccgcccttccaatgtaccaatgtaaatcttacatgtattgattgatgtgttatgtcttccttaatgtataaaggcaagctgtaccccaaacaccctgggcacatgtcattaggacctcctgaggctgtgtcatggatgtatttttaaccttggcaaagcaaaccttctaaattgattgagacctgtttcagataacttttgggtttacaactttatgctaattcagagcatttttctttaaatcttcctcttgcttttgtagactcctatcttgccatctcctgtcttcttacttctagtttcacacctaaactgataatgtcttctacctttatcatttgtttcattgttatcattcagagagcctctaaatttttgtacttctgtcattactctccttagaaagtggtggtggacatggtagaaggaggtgctaatttttttccgtacgtataaatgtttatgaaaagtgagtttgtgctgtagttatagtttcctatcttgttttttatttaggagaaaagagaatccttgtgcattgttgttggtttgtaaattgatacagttattatggaaaaaagtatgggggtttctcaaaaaattaaaaatagaactaccatatgatccagcaatcctactactggtatatacccaaaggaaggtaaatcagtatgttgatgagatatctgcaatctcatgttcattgcagcattatccacaatagccaagacatagaaacaacctaaatgccccacaacagatgaatggataaagaaaatgtatatactgtcatgcgctgctgagtaatgctttttcggtcaatgacagaccacatgtataacagtggttccataagattatgatggagctgaaaagttcctagtgatttctgatgttgtagccatctttacgtcatagcacaatgccttactcacgtgtttgtggtgatgccggtgtaaattaacctacttcactgccagttgtgtaaaagtataacacatacaattatgtataggctgggtgcagtggttcatgcctgttctcagaactttgggaggctgaggtaggaggattgcttgagcccaggagtttgagatcagcttaggcaacacagggagaccctatccctacaaataataataaaaaaatagccaggtgtggtggtgtgcacctttagtcccagttacttgggaggctgaggtgagagacttgcttgattcttgagcccagaaggttgaggctgtagtgagccatgactgcaccactgcactccagcctgtgtgattgagcaagatcctgtctcaaaaaaatttaaaaaagcagaaaacaaaaataaaaattatgtatagtacatagtacttgataatgataaacaattatgttgctggtttgtatgtttactatactatacttctaattgttattttagagtgtactccttctacttatagaaaacaagttaactgtaaaataatctcaggcaggtccttaaggaggtattcaagaaggagctattttttatcgcaagagatgacggctccttgtatgttggtgccccgaacacctaccttccagtgggacaagatgtggaagtggaagacagtgatattgatgatcctgaccctgtgtaggccgaggctaatgtgtgtgtttgtgtctgttaatattggttatatggtttaaatatggttaatattgagtgtcaatttgattggattgaaggatgcaaagtattttttcctgggtgtatctgtgttgccaaaggagattaacatttgagtcagtggactgggagaggcagacccaccctcaactggctgggcaccatctaatcagctgccagtgtggctagaataaagcaggcagaagaagttggaaggactagacttgctgagtcttccagccttcatctttctcccatgcctcatgcttcttgcccttgaacatcagactccaagttcttcagcttttggacaccagtgatttgtcaggggctcttgggccttcagccacagactgaaagctgcactgtcgagcttccctatttttgaggtttggggactcagactggcttccttgctcctcaccttgcagatagcctattgtgggatttcgccttgtgatcgtgtgtgtcaatactccttaataaactccccttcatatatacagccatcctattagttctgcccctctagagaaccctgactaatacagtgtcttagttgaggtacattgtacacttgtctgtaattccaaggtgatctttttttttttttttgagctttcttaaaaattgtttttttaaaaataatattaaatttattttcactatctatactaaatatatatatatataattagaaatattgatgtactactataagtaatttcccaatattaaactcttcttgcattcctggaattatcctcttctatggttattaatgattcctttagttgattttcaagttctgcccgtatgttattgtgattttcacctctctaccctatcataattatgattattggagatttgtgtatcttcttttcagaaatgtctatgtaagccctttgcccatttttaaattgggttatttgcttttttcttgttgagttgtagaagttcttatccggaatatattctggatattaattctattgaataaatgatttgaaaatattttctctcattccatgggttgcctttgcaccctcttgattgttttctttgattcacagatgttttaaagttctgtttcttcacatttgttaattttttgcttttgctgcctgtgctttggtgtcatatccaagaagtcattgtcaaatccaatgttatgaagcttttctttatgttttcttttaggagttttatagttttagggcttatatttaggtcttcagttcattttttttgtcgttaattttcacatgtggtataaggtaaggctccaactgtattcttttgcatgtggatatatggttttctcagcaccagttgttgaaatactgttctttctccattctgataagttctgataaatccattttaagggtttatcagaacccttattagataagcctttccattttagatgtaaaaatggaaagctgaaagtatattttcaatgtaatgatattttcaacttatgatagttttatccacatgtaaccccattgtaagttgaggagcataccgaatggtaaagttgaaaaatggtaagtcaagccgtagttagttagggaccatccataatctctttacaacttataaaaaagctctcttgtgtatatatataatgtacagttgaaatatatatatttaaaagtgtaaccattgaaaaatcctatgaaaaagatatgtttataatatgctataaatcaagaattatgattaattcctgctggtatagctgcagccaaaaaaaaccaaaccaaaaacaaaacaaaaaaaccccaacaaaacaatgaaaacccacaaacaaacccaaaagagtcctattacaggctgtattcttcatttacccaattagacgctgaaggctttagaactataaacttgttgttatcttatttttaactcgcactactttgccttatacatgggtgatgttggactggaaggcaagaaatttgaaaatttgattcatggattcataattatgtttttgtcattcagagattgtataatgaacttgtgtgaacagtttttaaaatttttcatgtttttgataaagtggcttcatactctgttttatttcatccttgcaacagagtcacctaatctttctgcgtggtaaatgcttctgaaaacgaggagtttgagccacaagattttctgctctttttactgctctttaatttcctgatgtctttttgtagtatactgaaaacagatttggagatttcccaggtaaatcccaaagaactgtaagaaacagctgtgcctagatatttcatacttgaggagccaaaacccctgtcaaataatggaataattttcatgtttgtgagaaattgttaagaaagatgatagtgataaaatggaaaattattcagcttcaacttactagaaattgtaatcgtatccaagtgaaataaaacacttggagggatcataaacacaattaaccttaaaaattcttctctgggctcatttgacatagtatatgtgtttattctaagtgcaattttgggggctatgacattttaatttaggctagccttgccattgcccgctcctcttcccccttcaatgcacacaaactaaaatgcttacatacacctggggcactcatcttttttgaacattttcaatctcctacctctgaatctttctgtggtcttttacacttagtcctcttgttgaattctgttcagtgttcaatgtgcaacttcagtattaggttatccatataacctttctttaacttcccagttgaaattactcacccccaatctaactccccctcactgctttaggtattgtgtataatatacattatttatgtgtacatacacacatacactttgatggcactttccacatttgtctcattctaaatatatatatatatctgtattctctaaatgtaaaccttcttgtgttcaggtatttgataatttttttgagtttgtgtcccacctagaaattataacagttactggcccatggtaatttctcacaatagagaagggcttaggacaaagttttctgaaccctgccccttttcaaaatgaaatatatatgtaggattgataaaaatatatggaagagatgaaggggagtgttttatttgtatgaatttattagttcaaatttgtgagatttgattcttactgccattcaaaagagcaatgaggctgatttaacaaacttcctgtgaaattgttgtttatggaagacagttgtagtcacatcagtctaagcatccaatgtaattttctctctctcttactctctttttctgtcttttcctctccctcaatctccctttctctctctctctctgcataatattgagaaaatctagatttacatggatgagtagttacaaatggcagtattttttaaaatagcttgctctttagtgtaactgatacagtatttttaaatagcttcttcttcaatttaactgaaacagtagctcaaaaggctaggaaatgcttgtttcaaattaaaatcacagcaagtaacaagtgcatgcagttattaattgttaaatgttcagtttagagagtcaattaacggattcatcagctagtttaatttgtcaccgtttggcagaaaataccatatgaatgtatcctgtcacttaattgagtggaacacacaaatgccagaggattgtattcacttgtatgattttatgtgaatagacatatacaggtctgaattaaaagaacaaatcaaaacagaaaaagacctgcagtcttgttaatcggtgtcacatttttaaggagttcaaatatatccactgcaaagttttattttgagggctccagaaaaaagcaaagttaaccaggcagcacaaattaagtcatttggggtctcccttgtattaaaatttgataaagaactcaagtgtgggtaatacttcttattccagttttaaaaatgattaatatgtttagcaatgaaacttgaatcaaatgtttgctgaaccctggaaacacattttcattccacatgactaggataaaaggatgttagcactgggaaggtacattgtgtctaactctttcatttttctagatttgaactgcgatgatgtatatgaaagtttccagtacaatgtgtagggtgtgcactaagtagatattttcttgaaaaaatgaaatgaaataatgaaatgaatgaatctttatggaacgctttttgcatgctaggcactctgctcataacaaacccaggatggtactattattatttccattttacagataagaaaactgaggcataaagagattacataatatgttcaaggtcacccagcttatccactgcagaacatggatttgaaatctggcgctctggacctccccaaatccaaatgtttagccaccacagacagtataccatcataatgcattcagcaagtgcagtgctttccctagtgatttttttttgtttgattgtggctgattttatgcaatcacgaaaggctgatctttctgttttgtttatcattttcatagaactatgatgattcttaattgtctgttaaccttcagcagtacatttgctaacagcatttaaagaaacagatcatgtctcggcacttggatttataaagaacatttgattttcccagtgaacctttccaccttcttttcagttcaggcagatgcactgatgtgtgtgtggcatatccctcctgacacagttttattgtgggcagaagagaaaaaaatagcatttaaaaccagagaccttgttattttttcttctttacacttcaatgattgttgattttgtgtcttgagaagactagttgtgaagaccatgtaggcaaaaaaaatcacaaaagagtcaaagcagaggccttgagaattgcttgagaatttatgctactttcaggagctttttgtggtataacaatgcagagcatagaaggaggaaggaaatggtatttgtttcaaaggatcattatttacttctggtttcagtagtcagttagccagtagatatactgagaaacttaagaaagtccccatcatctctgttgaagaaggataagttggtgcacgatgacaatataacattatattgcatcatagtgttatggatcaagtgctaggggatcgcgataatgggagtaagtagctggggtggggtgcagataggaaggaccttacagtagaggtgacacttgagcaaggtcttaagggataaataggagtttgctaggctatgaagtggggactagaagtgcagacactttctgtcttctccactttggcctgttactctatttccctgaattttttcatcaacctcctctcttctgtttttctttgctttttgtcaaaggggaaaagtaactaaacatgactaactgaaataaaatgctcctttatttttcttgtttttctaagaggtcttatatgaagtacattcaaaatttttgttttgttttactctaaacaaagtataggtagagccattgtttaatcttatgtcatactgatacattgatatcacaattagctaatatttagtaaaagaatgtgcaaagagagttgagttccagtagctgtagggattaggaataaccattttcttttaagctttatatctggatccattctaattcttggtctccgaatgattgatcttatttgctttaacaagtttagtgcagttatttgtagatgtatatatgtaggcctttcctgtaagaagttgagatcatccctattgtattgtgaccataatcatggattttccagaagagctccgtttaaagtgttctttggtaattccttaaaaataccaaagctggatctattttgggcttggaatactgtttatgtactaggtgtttcgtttttggtaaatctggggggttatcagatcagctgtcagaggtctgcagaatgatggcaaagcacctacatgaagatgtttacctgagttacccaggtaattgctataatcccttgctggctgtcaaccattccataatggcagtcttccttgccaggcctttctccactagatggtgctaacacccactgttgcagctccggctcagggtaagggtaatttaataatcaaaggcaaatcatttatttaatatctatttaacacttacgaaccggaccctacaggggttgtgagtagtgggttacgaagacaactaggcctcagatcctgactttgggagaatatactcttattgttatacagaaatagcaagggagcaagcggaagaggtcataagagaggcagtctaataaagtggtttaacatgcgcattctggagacagagtccctggtttcacatcccagcttgttcatttgctagtttactagctaaattacttcacttctttgtgcctcagctttgtcatctgtaaaatgtgaatagtaatattcacatttcatttacaattcctcattcatttacaatttctcatctctaaaatatgaatgataatattacctccttcatatggctggtgtgaggattacatgagttaaatatgtaaagcacttagcactatagctgacgtaaatccccacccacagctaccagcacgtaagtccagtgaaggtagtgagctttgtcttattattttttttatttttattttttttgagatggagtcttgctccataacccaggctggagtgcagtggcgtgatcccatctccctcactgcaacctctgcctcctgggttcaagtgattctcctgtctctgtctcccgagtagctgggagtacaggtgcgtgccaccacacacagctaatttttgtatttttaatagagacggggtttcaccatattgcccaggatggtcttgaactcctgaccttgtgatccacccaccttggcctcccaaagtgctgggattacaggcgtgacccactgtgcccagcggtttgtcttattatttactgatgtatccccagtgtgtctggcacatagtaggccctcctctttagtaaatatgttgaatgaataaggcacggttagaggatggctttgtgaatctacctgagtgagtgatgtgtggaagtaagggtctaacaggagctcagaagctttctagtttactcactttcttctagatttctgtcctactcattctaaagaggtatcttattattaaagtatgccattttcctaagaagatcttcctgagaaaatgcagtaacgcagacgatgattttttcccacgtattgtgccagagaggaaggcgtccatgaagacctttcatgccttgggcacctcttacatggggctggtctcctggaggtatcaccactcatcctgtctgattctccctcttgccctcttgctttctctctacattgaacaaacatcttgaaggcaaatgtcaagacaaggaataggaagagcttaatttgtcacgttgagtaccgctgtgtgtagaactgcaatttgcattttaatgtcctgcttattcctgaaaaatggcattttacagatttcctgtattattcatgaattttaagctttgtagtttaaaaataaaaattcaggtaataaccaagaataagagaagttaaactctgtcaggttttcttactcttccctggtctcatgacttttccatctatttaagcatttcatagcctattcttatgttggttcttagatattaggaacaaatacacgtggaagtgttagctcaggcaccacatctggcttcctcgttagcttcaaattccccaaaatacatatgtgggaaaaaaaatcagtggcctgcatagagaaccatgaacacatacctagcagcaggggagaaccacagcattttcctgataatgaagtggatgaaccatccttagccaaggcctgccgtgggccacttggcatttactgagtgttagggcaccccgatggttatcctctgtgttgggatgtgtgaggtttataatattgagtaaagatcaggtgttaatctgcctgctcttctaaattatgtgtttttaatgaaaacacaggttggcccaggttagagataaacccgacatatgtgctgaggaagttccatcccaagaaatgcttggaatgagcagtatttaagaaggaagccaggtggtatgaaagcaccttgtagaaaggccacatcccagtggtcacatgaacacaggtgagaaatcacacttcaggggcagatacattcccaggtcgggttgctcagctggcagtaccatggctgctttccagctctcccaagaaggggcgtcaaggccacaagactttgtggattgctgtattcttggcccaattcttgtcatcaggtgttgtggtgcgttctgagaaggagtaagaattgttggggaaaaaaatcagcatagttttgaggactaaagtaaagtataagaatgaaccatagtatttcttaaaatacatcacaaaatcaaggttggagttctggacgctcagtactggttcttggctgaaatggctattgccacaggcagtgttaagattggtgggggaatgcagaagtgcagttggttattcatatgtatttagtgcctgtgcaccaggtactgagtcatgtgttatatggagaagtgtgtgtgtctgggggcagtggaggtgaggaggcagatagacagacattacgaaggtatcaaaggaatttacatatagggtttgaaaatcccctagactctacttcgctttcaccgagaagacagagttcaaaatacatgtctctgccacttctttaattagattgtcaattagatatttaggcctttctgagtgatcaaacacttttgatgtttctagctgcctctgatgtttatgggacaggtacagtttttgctacggttttctgcatgtttcattcattcatttattcatccaaccaatatttatttaatgcttatgtcatatcaaccattgtaccagggtttgggtttattgctgacctgaacaatgaaaaacacagttcttgtgctaatgcgtcttatattactgggaatccagacaaatcagcaggtcacttatagcctcctgcagcggatgatgaggtgattccctgagaactcagagcagggagctcagtgagatcagagagtctttctggaggacacggcatcctagctgatatctaaaaaatgagtaagtcttagcctgaagaagtctatggaatgttctcagcagaggagcagcctgtgcaatggtggaagcttgagccttttccagagtggttgacaacgtgaataggagttaagaaactgggaagtaatatagaactgtatgttctggaactaatgatgccaagtcatgtggtcagctattacacattgttctggatcaaggtgagaatcattaggctttctcccgactgcctgtcttagagagtgtgttggctccacataggataaagtgaaagaaggtagtaaagtcaattcacattaatccccattccttaagcaaacctcttggcttcctgacattatactgatattggctcagttgtaattcatttattatatatactactgcatttatgataatattgggtgaatgtttttaaaaaaactagatagtagtagaatttgtttttatggcttccatttattgaggatgacctatgtgctggcattgtaccaaggtttttaaaagggttcatatttaaaccctgacatagtcctgtaggggaggaattattatatttccattgtgcagatgagggccagacagtccaagagatgaagtggcctgctctgggatgcttgcctaagaaggattagagcagggttcaaacctaggctaagaggataggcacagaaccccaatacttgagcttcagagaaagaacacagaggtatttagcacatgatgaaaggagagttattaatggatcttttcagagtcctatataattaattttaagataacgaaaggattttaagagataaatggttaaatctcctcagctggctggcagctggctggcatcatgattagagagttttgtatgtggtgtattttgtgacagataatgtataaaatgttatactattccacatcatctacttaatatgacttgttttagtaagaatgtaattaatccccatctttctttgtataattgtattgtagctgtcaagaactaaatgttctagaaattttgcttgaagtcatagaataaaaaggataattatatagtaacctttccccggtggaccaacctagttggaaaaagtaatggtgaagagccatagctacaccatgagtggagcatgagaaaagaagacccaggcagaggtgaactgtgtattagtggggactccaaagtacagcagaaacatcacagtaattgaagcaggtgacaaggagaggcaaacataaaccattcaagtaatggggtggagaaaatactgagtaaaattttaacatgaaattaaaatccagtttatttctagtagcattatggatggatcaaatattctaaaaagcctatctctaaaaagcaaaacactaaaaagcctggataaaattttaaaaatacataccattttaattgcatggctgagctggcaagaaagtaagaggaatccttagagatatgaaatggagagaaagcaaggggcccaagaggtaaaccagtatagaagctattagcttccattggggataggtgctgatttctggcgacccagaactttgaatataaaggctgcattctggaggcaggaaataaacacagggcttttacaaagtggggagtaagactgaagctgccaccaaatctagggcttttaaaaacatgacccaggggaggaaaatttgccagggaaatttgccttttcaacttgggcactggtagtgggaagtctttcttgagaatctgtaattatagcaggcactcatggggctaggggctaagttcatccttctcctgaggtccagaaaaaaatagagaaataaaaacacttcaaactggaatttaatttaaaggggtcctggactgacagcactgctggcctgacagaagtagatgcaaatggtaattggagaaacagacccttattacaggccttagagaattcccacagttccagtcccagtaagctcctagtcaccaaatcataaaacttatcaggaaacaaggcacttccaccaaaaactatacacagcacaatggatctgcagacttgacaggttagaattatcaaataccaaacataaaatagccatgttcactgttttaaatatataaaagatggaatcaatggtatgagcaagaaagaagcaaacaaacaaaaaacacctcaaaaatgaagcggatttgtgggaaaggagaaaaaggccccagaatgagtggcattagaaaatattagaaaattgtacatgtcaatgaacacttgcggagcctcagaagcatctccatggatcaggggtttaccttgttttggaagatctttgttgagtcttttgcaccatttaagagcacaattatttatttatttatttatcagaatgcctttcctctggaagaatctaggtgatctcattccttgaagtataggaaaggtgatggggcatgattctagcaggtttgattgctcaaggaagtcaggaattccaaagatgttttgaagagatttaacttcatcattgccatcatcatcatcatcatcatccccatttatacttattaggggcatactatgtatcatgcattgtattgaaaatataatatggattattttacttaaacttattataatcttattacataattactattagtagccctatgttacaagtgcgataattaagccttagcgggggtcaatggtttgctcaagattaagccttctgagcacacatttctgaatgttgttgcctctggaagctgctcagtgtcctctctttgaagcagagcagccagtgtcgtatcctgaggagtctggggcattgagtgcagtctctcgcccatgtctgtggaattggaggtgccatgaactctgctagggtggtatcaaggagtggagctctctcacctgtatttgtgatgtcccatgcatgacaggcctcccaaggcaggagccagcagagccagaggccaatgcttggtcctggagtccagcctgatccaacccaggcagagaagtgagagagtcaaggtctgcagtcaaaggagaaagtgcccaaagcaaggaagaaaggctgggggcttggagaaagccttgagtaaggtaccaattgtggtttgactgctgcctgtgcttactatggccacaggcagggttatgccgttaactaaattgtaatgggcaaagaacagtggctagagggctttttccagctaaatctagattttgatgtagaaaatctgaagcatgaatatttctttaagttgatggggaaggactttagttctgattctctgcctaagataaataaacgaagaagctttattatataacaagataaaatgtttgaaataaggacatttgaaatcagattttttatttcctggtagaataacacacagtattttctaggaaaaggattttttaaaaaatcagttcttatcttcaattagaagataaataatagcattgtgttgaccatgtattacccttctgatgtcttctggatcttgtggggaatatgaagttagttttctagttgtttccagaggagaatgtctgaaagactttttttctcttcgaaagagttatttaaaagtaaaactttaaaaagttgttgctcatttgttaggggttcggcttaaattccttattctcataattcagctttaaaattgataggatgtgtttatatatactaatagggagatgccatatatatatactgtggagaaaagagcaagttttagaatatgcaaaatatgatctcatttttaggaaaagattacatatcaacatacataaataaattatgcatagagaatttctggaggaatacacttaacaatgattacttctaagagcagtattggggatctagggtagaaatgggggagaggacttccacttttcaattcatactattttgcattatttgaaattttgctgtggtcatatattgttttctaatctaaaaattaagaaaagtttcagaatattaaatttcaagccatatctgtcatagatgtaaacgtttattccttgcacgggagttttgtatatgttttcttcttcaaaccaatggaactcttaggaagggtaggaaactaaagcatgtggtcccacaacattccaggcactaggggttatgtctgtctctttctgggataaagaaacagaccacttccaacaatcccgttggattttacttcttagcagatttatacatgtggagagtttgattttgtcattcttgatgatattggttgacctttgtcctgagtgtgtgtgagtgtgggtctgttccactgccctgtggtgttgtgcctctcactgtttcttggcactctctgggttgctatttgtgtattcatttaatcatttatcatttatttacgaatcactttccatgtggcacatactgtgcttcattcttgaatttttttttttttttttttgagatggagtctcactctgtcgcccaggctagagtgcagtgccacgatctcggctcactgcaacctccgtctcctgggttcaagcaattctcctacctcagcctcccgagtagctgggattacaagtgcccgccaccacgcccagataattttacgcatttttagtagagatggggtttcaccacattggccaggctggtctcgaactcctgacctcaggtgatccgcctgccttggcctcccaaaatactgggattacaggcatgagccaccgcgcccggccgaattttattttcttactgtttacttatgtatttttgtagagacagggtcttgctatgtcacccaggctggtcttgaacccttgacctcaagtgatcctttggcctcagcctctcaatgtgctgggatttcaggtgtgagccacgacacctggcctcatacttgaaattttaaaggacaagtgatacacttatagaagcttgtaattttgagtaagatagacaataacatgatgtgaccagtgcaatgatatggacagagttctaacctagcctgcatgcagggctggagggtgaaggatgactgatgggaatacagattaaccaagaaaagggttggggatggggtgtcctaagcacaggggccacactaccctaaagtatggaggtaaaaaataacatggaatgtgtgttaggcatttgtgtcgctcacaaatatttccatttgtcctccatctggacacgtgacaaattgcacttccctgcctccttgtggttcatcaaggttatgcaatgtgaggagaaatgacaaatgttttttctgggtgagatcatttaactatgggtgtcaagttctccagagcactcttcccctggcctgggcattgtaggagtatcttgacacagagaggtattacttagccatagtatggaggagagctggcctaaagagttgcctggactcagagaagaggtgacgagtgaaaaatgtacatttgttgtgattttggagttgtttgtgaccagcccataacctagcttctttggaccagtgcagtatacgagaaacaaaaagcaggtggaggcagggagtcagcaatgaggctggagcaaaacgcagggtcagagcagggaaggccttgtcttccttcttgggacagaacattgcccacttctcacaatcacatcaggttttatttcttagcagatttagaagtacagagaattctattttgtcattcctggtgatgttggtccctctttctctatttgtcctaacttttcctctgttctaacattctctgctccaaagggggagaaggacaaactggaaaaatcttttaaaaaatcttcaagaggcactatgtttcttcagggatggctcctgggggctgtgcaaggaaacaacactatgaagtggcatgtttaaaatccttcctcctggcctttcatcagtgagaatcagggcagcagttctctcccttcatggtggttgactccctcaatctagcacactgtgcagaaagtttggagtgcctgatctcttctcctgatgggggtacaccagctgggggttatgcaggaacaaggcaaaggtcagggtgcctgaggccaaggaagactgttttgaagttgtatctggagagtgttgggatcaaagctaaaaaattcaagttcagacttgagttgggaagagtagaggtagaagcagatcacatggaaaatagtatccaggaatggagacacatttagacagtggaagagacaggaaaacagtgagtgtgggcaagtggaaagccacctaaattaagtacagaggtagagggtgagtatatagtgtatgtttctgtgggagaccccacttcatttaaaggagccacgtttgagcagtcatagcagtgggacttttcgtttagtacagtctctgttttaggatgtcttagcttattttctgttgtttgtaacataatacctaaaactgggtaatttatgaggaaaaggaatgtattacctacaattatggaggctgagaagtccaaggttgaggggtcacatctggtgaaggccttcttgctggtagggactctgcagagtccccaggtggtgcagagcatcactcggtgaggggctgagcatgctagctcaagtctctcttccttttcttataaagctaccacttccactcccataataatctatgaatccattaacccattaccccactaatccattaatccatgaatggattaatccattcatcagggcagagccctcctgacccagtcttctcttaaaggccggacctttcaatactgccacactggggattaaatttcaacatgagtttctgaagggacagacattcaaaccatagcacaggaggataatcaagagctcattatgtccagtggtctactctgctatgctgaaatggctgggtggatagagtaatgtcaacatccttgtcctttggaatccatggttcagctagttagaatcaactttaggggaaatggaagattgaagaactgtaggaaattgtagccttggaagtgttcatagaggaattttcagcatggacagaagaggaagagatgaaggggtgtgtgggatttgggggtggtggataaggaagtggcattgttacatcttgctacagattttgatctctcatactgaccctatgtgctttcacttcccatcagctgtcacaggacacagcaattaaggacccaactccttgtttccctgaattgtgcaataacctcattgttcacaactgctggttatctggttttgtttaggatagcaatgctttcagttgagatagttgcctcccagcctctcttcgtgctatgatggtcaggttacacagccctggccagtgagaccaaaatgaaatttcttgcaggtggcacctggaaaagttcttaaaaatggacagacttggttggcattatcttttgccttttggccttttgcctgtcttcttgcctggaacatggatggtgtacctctttttgtaggaggcatcttttttttttttttttttttgagacggagtctctctctgtcacccaggctggagtgcagtggcgtcatcttggctcactgcaacctccgcctcccaggttcaagcaattctcctgcctcagcatccttagtagctgggattacaggcgcccaccaccacacccagctaatttttgtatttttagtagagacagggtttcaccatgttggtcaggctggtctcaaacccctgacctcgtgatccacccgcctcagcctcccaaagtgctgggattataggtgtgagccaccacgcccggcctgtaggaggcatcttaaggccacaggtaagtcttttaaaaatgggaatttagaaggatgttgggtcctttgggtcgttgacagtattgtagagtaagtgactatacctgtcctggcctgctgaccctcagaggaaaaccttatttatttaagccagttagtgaggctattatattcagcccaaaaacattcctatctgatatatactcacttattctacagaattaattgctctcatttgccatgccataatgaattcttgccagtcctcagctaactaagaccttcaattaattagattttctttcctttgcctctctgtatgtggacagctattatggaataacaacactgagaccgtgtagcctttgtaatcagcaaagaaaattctattatagtctgtataccatacttatctaagtggatatctacctaatatattttagaaagatttttcacattaaggagcaaaacatgaatcttaggattcaaaaaagaaaatgatcttactccctaagtattactcttaatctgatattttccacataaatattggttttaaaatttaaaaaacagaacaaactcatgttctttcaacctatgtgacatgtgaggtatgaagtttaggaaattacctgtatgactaaatcaaatttaaattataaacttcagagaaagaagaaaaggttagaagcttcgcatcttgtctaaggtttatagaatttattcacttattaaaggatataaagattacctacctgctgctttctcaaataaatatctgtgaattagagttggtcagcatacatacatatgagggtgtatctgaattaaaacatttgaaaatgaaaagttagagacagcagaagaaggaaacagtgtccatccaacagacctgagtgatattggatatggaaattagccagacctttcatgattaaagtatttacgaatttaagtagtcaactattacagacatgaaatagtactgagaacagactgggggaacaaagagcaggtagaccctattgtctacacctgccatatcctatatggtaggcaatagccatgtggggcttttaaaaattggaaatgtgacccatgagaattatgatgtgctgtcagtgtaaaatattcactagatttaaaagaatttatgcaagaaatagaatgcaaactatctctctaataattttatatgtggaaattatatttaggatatgttgtatgaaaaaatatattattaaaattaatttcacttgtttatttttacttctttcttttactagaaacttcaaaatacacatatggctctcatttgtggtttatgttgtgtttctcttgggcagtgctggtctcaaccaagtaattgaaacattctcagagatacagaagaaagtcagtgaatagaaagcactgttcttgtaactgaagaaaaattgaactgagaaaagctgtcacaaattcttcaagaatctactttctagaattttgtctctatagagtctgttatctacagaacagcctgagtgagcactaaaaaatatgtcaggccaagtcttcccctgctcaaccctccagggctttcttagaataaaacaaaaggcctcatagttgcctgctgggccctgtgaggtttggcttctgaccactttggaatgtatcacttccctttccccttgcgtgtgtgatgctggccacactggcacttttgctgtttcatgatcatggccacatggtgttccctgtgggcctttgcatgtaggattctcttcctcaacatcttcacacagctccctctttcacctcttgcaggactctgctgggacagagacctctcaactcgccatcacaccttaccccctccctctatccctgtaattgtctacacagcaccgagcacggcctgaaatcaccaaggatgatgatttgtttccttgcctttatcaccatcctatcactattgcctcgaagagcagtggaatgtagtaggccctcgacttcaataaacacatcaatgaatacatggatgaaataagtttaagtgaagcaaacaaaaagggaaaattattagaaggatatacatcaaaatattagtaagacctatttctgagtgatgagagtatgggtaactttaattttcttctgttttctacccaacggcatatctcatcttcttcgttatttagagagctttattttctttaggcagtccctctgctgcacgcagtcatgtttcactaaaccactcaggattgttttatattttgtatattttatatttctacctgtgattcgtttaagaatgggtatgtgatgtatttcttaccactgcgctatgagtggagggctgaaaaggccatcttggaaaggtttcatttcttaaaaagcgatgcttatgaagaaagtttgtcagagttttgctggtcttggtttgtatgtgatgtttgcaactgcagcagccatattgtggtcctggggctgtggggcccatgcactgaggatggcagagtaaaaagatggaaggaaaccaagtccctcaccgtgtcattgggctgccaaattaactatttcagatctgtcctacttaataaatcattcttatttgggccattttgagttgagttttctgaaaaatttttccagcaaagtaactatatatctgactgatgctatgtcataacaaaattcacatgaagcagcctccaaattataaacctgtcagataaaactgcagaagtcataataagaggtactattgtagaatttctccccaaggaacaagctggtgacgtaattaacacaaaatgagtactgagtactaagggaactgacaactccaataaagaagaaatactttgaatgatcaatatatttatataaaacttgattgataaatataacagaaaagtggaaaaagtagaaagctgctccccttttcatgtaatctgtgctgattcagacacatttggagtctggagttcaattctgtaaaaaattgatgccatcttctgtggaaaattctgatggtatcatttgagctcctggatcaagatgggcctgaagataacctgagcttttttttttattcagtgagccattatgtttgccatcttgcttattcctgcttgagcttagggttatatcatcgctaatggaaaggacctaactgaacagaggatgtgaaaggaatgtatcacaaatgtcagcagtcatatagttggcagatcggaaaaaaaaatagccttattttcaattgctgtaaaagaagaacacctctgcactcccatgtttgttgctgttgttattcacaataaccaagatttggaagcaacctaagggtctatcacctgacaaatggataaaggaaatgtggtacatatacgcaatgcagtactattcaaccataaaaaaagaaggagattctgtcctttgtaacaatatgagtggaattcgaggttattatgttaagtgaaataagccaggcacaaaaaggcaaacatcacatgttttcacctgtgggatctaaaaatcaaagcaattgaacatagagagtagaaggatggttaccagcagctgggaagagtagtgggggttggagagcaggtgaggatgattaatgggtacaaaaaaaaagaatgaataaggcatcctattcgatagtacaacagggtgagtatagtcaatagaaacttaattgtacatttaaaaataacttaaaaagtatcagtagattgtttgtaacacaaaagataaatgcttgagaggatggacacttcattgtccatgatgtgattattatacattgcatgtctgtattagaatatcctatgtacctcataaatatatacacctattatgtacccacaataataaaaaaaaagaatgacacctatagaggaaaattcattaaaaggagcattttttcttgacttaatgtagaacttttaaacacttgtgactatcccacagtgtagctggttgcttcaagcagctgcgacttctctgtcaatgtatgagtttgaccgaaagcaagggatgctttaaatgggtatttctatactgagttactgtcagggtttctgagtttttcccaactagaaatttcagttattcttcaactggaaatggaaaattgggattatatgagaagagcatgtgtatggatatactttgtaaatgattatgtgtgtgtgtattggttaagaggaagctctggagtgagaaaactcatgttgaaacctagttttgagctttattatgtgatgttgggagagtaaacctttctgagcctcagtttcctcatttgtaaaatagggatgataataatatctagagggttgtaaagactgaatccagtgctgtagataaacttttatcccagaccctggcatgttacatatgctcagttagctagtatttaataaaaacatgaggcagaattaattttgttcttgttctgcttttagtaatacttattctgggcataaaaggaaaatatataccatgtttcattaaacttagacaaagcagttgggtttctgggtagatacatgtgtaaaataatatgacgccctcaccacacacacacacttagaaatggacggtaagtttattagctacaattttaaattctggaagatttttgctttattttaaagatacgtcatgtgaaaagggactacaaggaaataggagataaatagcagcatcctttgaaccgaacttgtgtggttttttaatggctaatatgttaaatgggagaggtagaagagaagaaaaatctccactcttattgataaattttttatttcctagaagaaaagtaagacattgaaattattagactataactaatggctcatataggctactactattgaatattatttacatctattataatgattccattttaaaagaaaaacatcaaaaggatatgaggataaaggattagaatgaaagatgataataaataataaactctatatctaatgactatttgcttttttgaaagtattaagtaagagtaaaaattatgctgctatgacctagggttttatttttagaaatttgactactgtctgaatatagtacgcttaataaattttatggtaattttgtcattgattttctacttcaactaacttcctaaatacttgtatacataaatggcttatagttctgaccaaaagggatttttttcctaaaaaaaaagttattttaaaaaatttaccttgaaagttaggtatcttttacttttttttccctctatttcctttcccttttaatctctcattttgttataggatttttgggttgtcatttctctggctggaaacctctgtctggtggtgcgtttgcctgagttttgcttggggctgctgttcttgttctgcccactcggcctggcaggctgcacttggcttgtgctaccagcctggatcccacaccttcaagggagattgtgagtcaggtgtggagtggtgaggggtgtgtgagtgaatgtggggtctggccactgcacagtcagacatgctggctgctgccatggggcaggcagctccaggtgctggcatgggcgtcagctctctgggaggctgtggctggaccaggcacactgcaagcagcttccctggctggcattggggaatgtggtggcacccagaagcttgaggacaccaggaatcacaggtctcaaagagggagtcacagccctggctcagggagctcctcaggtctggtctccccaaagggccacagctcttctctccttctctttgcctgcaacctggtgagcagtgggtatgtttcagccctgtttgtgttatagcagctcttttagcctcgccatttggtgggtcctgagttattgttctgcaaacaggaagaatgaggtatgcggacaagtgaagggtgagcaagacgaagaggagctttactgagcaatagaacaaccagcagagacccacagggtgcagctcctttctaaggccagggtgtcccattgagtgttcagctcctagcagagagggtagctcctctttgcaggcaggtcttcccaacaagtgtttggctcccagcagagagggtagctcctgtctgcagctggtcatcccgatgagtgttcagttctcagcagagagggtagctcctttctgcagcttgtggtcctgccatcccttctgctctggctgagcctggggcttttatgggcctcagatgggaggaagtgtgtgcccattagtccatgggtggccatgggtgggtctgaaaaaggcaccacaagttcccatctcagtccgtgtgggactggcagcgtgagccccagtcttcaggccctccctggcccgaaggtggggcctcactgggaacccaccgccttctgcccaggagcctttctgcctcctgctagggtccatggcacccaggctgcttgggccaaggggcacctgcaggccagtgccgagctgccctcagcacccaccttggcttccctgcagtgcttgttggtgcccaatgtctagagagggccagggcgacagggggctggcatgtcagtgctgtcctgagtgtgagcacacctggctgggctgtgacagtgcccgggctcggccccaatcccgctctgagatgggagcaggcactgggagtggggagaggccaggcagcaggagcagacaacccaaggggttggtgggccttctgggcccctgaggatacagagtcagagaccccaggtcctgtgcctgggagggtgggagccccgccctctccatggagcctgcaggcagcccaggctatgcctccttgcagcctggggtggggcctccaggtcctctctgggctcctctctgcctgcccctccgtgcccaactgtgctgctccagtgctggcaggtagctcggctcagccctgtcgcagtggcccccagggcagcaggctctcagagggtccctcttatccctggctccctccagctccatggagcgcagcaccatcctgggcccagctctgcctccttcccgtgccctccctgcaggtgccctccccgcaggtgcggtatgctagaatggtcatgctgggccagggcttcagagtcctggaggctgtgggcctgggggcaggttccgtctggctgcgcaagggtgggtgcagagcagtcagctgccttggggatgcggggcacaggggtccagccactgccactgctgctcccgcagcggctcctgctgccaccactcgcacctccttgctgcagccagcgtgatggcagcggctgctctggactgcctgctgctgctgtcaattttgttgcctgtaaaagggattttcagttttatttatttttgtcagtaatttaaataataatagttttatttttgtcaataatgtttgttattttggcaactggttttgctgttaaagtttttgctttggattttggaatctaattttttaaattccttttctaggttggaatatataattgattttctaattctaaaaattcttttgttcatttatcctcatggctattttaaagtgcatatttggttatagttgtaaagtctaaagcttattatttaaactttaaaccagaaaataattttgataagtatataaggatttgtattttactctattttagtggaaatatatgaacatttgtgataggcctcgatcagataagcaatttaattcagaaagaaaacacattgaaaatatgcatacatatgcacatataacatgcatttaaatattaaacacgtttgttagttgattgctttgggggaagattaatggaaatgggcaaattaattaacaattatcaaaagtaatgaataggaaagagagtatagagtaaatttaatcccaaactttccatacgacttccttaagaaagagaaatggtcttatcaaagtatgaaatatggagacaaatgtcttactcaaagcttacccaggtgccacagttttatatgcttttaaaaacttgaatatggatggatttagattactatgcatggtatccttacagttagaagtaaaatgtttacattcaaataattcagcaattgaggaaatttgaggaagctcttcttttctgcaaagatggctctgggacacacacccttagtaattgcaggattttttttggaacgtagtgctgtgggctgtagtaatcaaagtgttcttggctagtgggaggaatcatcagtactgtgctgtttcagtggtaccttctgtaactgaacacgagccttggccaacaacattcttccttttcttcaaaggccaactgaaggactgacagccactaagttttagggttcacattaccgaggaagaagttggagttgttttattctttatgtttgatctttctcatctgaagtgtggatttcattttgtccttgattggtggacatgagaataagaatgatgtgaatatcatttgaattcatttatcccattgcttatttattactggataaatgaatgatggcaaagtcccacaatttaatacttgcagttttaaaaaagcatgagggagctcttgatgcactagtatggaagtatcttgaggatatattaagtgaaaaaagcaacatgcagaagagagtatccagtatgctatcttacatttaagaaagagggagataagaacatatttgtatttgcttgcatttggacaaagaaaagatgaagggcacacaagattttaataaaagtgatacatattggaggtgggggatgaagaggatggaaacagaatttgaagcaaggtttctcaatatatgccttatatatcttcgaagtgtgtgaaaatgtttcatatttgatgaaataaataacattaaaagaaagatcaccctggatacctgaggataatgggttaggaaggagaatagtagttgcgagggaaccaatttagaggctattgcaatacttgcggacagagaatgattcttaaatgatggcaatggagacagaaaagtagataggttttagagatattgaggaggtaacataggcagagctgggttaagatggtgaatgagaaggactcttagatttctgggacagactcactaagttggggaaatggaaggatgttcagttttgtggagatgatatatttggacatgtcgagatggtgccagacttatagaagtgtttaataaaaacttgttagaggaaggagtgaataagacactttaaagatacccaagtagagatgtgaaggaggcagtcgattcatgggtctggagctccaaggggaagtcttggctgggatccaaattttgggataatctaagaagcttccacctttactgcttggaaaactccccctgggaagccagctgatacataagaagtctgtcgtgctctgaggaagcctaggctaactatgctaagaaggaaagcataattggggaagcactgagaatgtgagtgaagcatcctacagcccaaccaaataccagctaaatgcagggggaattttccaagcagtaaaggtggaagctgcacatctcttaagggtcagcctcagaagtcacatggcatcacttgctgtactctctgttggtaaaaacaagtcacaaggccagcccagaataaagagaaggagaaaaatttatctatcaaagagggatggcaaagaatatatggccatatttagtccaccacagctcattgggagattataccgttaggatgcatagaactttctcccaacatttacttaataaactaagaagctaacgagaattcatagtgcaaagataatttgcaaaaatttcagagaaattgaatatggttgaatcagctgttaattccaaacttgccaagttcatgaagagatttatataaagaaggactaattggcagacaaatgaaattaatggctgaaattataattttaaagtagggtttacccctaggccccacctaaccagggagctcagccagcaaccccacccatctgtggaacccagcctatgaccccactgagcagagagccaatccagtagccctattcaattgaggaacaaagcccgtgacctcatcccaccctgcctggccatggagtccagcctaaggctcttcccaattgctgagcacagcttgtgggtagagtccagctagtagccccgccagaccagggagcccagccagtggccctgcttgacttcggatcccaggcaggaaacccagccagctttagagtacctgcagtggccccactcaactagagatcgcaacaggaagctctgtctgtctgtcaatgctaccagttggcctgtcaagaaccataggctggactgagtagtgaagttctttccctgccaaagtgaacctataaaggtttgaagagatgactgtagagttttatgtgcagtggaagttaagttgttatcagcttaaattagggtgatgctataactataagatattttatgtaatccttatggtaaacacaaaggaaagacctgtagtagatacacacaagataaagagaaaagaaagtataccaccactacaaaaaatcttcaggttacaaaggaagacagcaagagaggaagaatggaataaaggaactacaaaacaggcagaaaacagcgaacaaaatggcagtggtgaatgtttacctatcaatatgtaatttcaatgtacatggattaaattctccacacacaaaagacatagaatggctgaatggataaaaaataagagccaataacatgctgcctacaagagactcacttgagctttaaggagacacatgggctgaaagtgggatggaaaatgggatggaaaaagatatttcatgcaagtagtaccaaaagagagtagcagtggatccacttatatcaaacaaaatagactttatgccaaaacaatcacaagagacaaagaaggtcattatgcaatgataaagaggtcaattaatcaggaagatacaacaatttaaatatttatgcatttaacattggaacacctaagtatataaagcaaatactaatagaatagaagggagaaataaacagcaatacaataatagtaggggacttaaatatcctactctcaacaatgaataaatcatccaagcataatatcaataaggaaccccagatatgagcagaactgtaggccaaatggacctaacagacatatacagaacattccacctggcagcagcagaatatacattcttctcaagcacacacagaacattttccaggatagatcatatgttaggccacaaaatatgcttcacaaattcaagaagattaatatcatatcaagtatcttttctgaacacagtggtatgaaactggaaatcaatcacaatagtaaaagtggaaaattcacagctatgtggaaattaaacaacatagttctgaacaaccaatgggtcaaagaagaaatgtaaagagtaattgaaaattctgaaacaaacaaaaatggaaacacaacataccaaaactaacaggatgccatgaaagtatttctaagagaaaggataggaataaacacctacatgttaagaaaaaaagaaagaacctaaataaacaatgcaactttatatgtcaaggaattatgaaatagaaaaaggccaaatttagcaggaggaaggacataataaagatcagagcaaaaaaaaaaatgaaatagactagatgaacagtagtaaagactaacaaaccagagctagttttttttggaaaagataaatcaacaaaccattaactagactaagaatgagagggaataattaaataaatcagaaatgaaagaggatacattaaaactgatgtcacagaaatacaaaggatcataagagactatgatgaataattataaagtaactaatagggatacttctaggggtagcctagaagaaatgggtaaattgctagaaacatacaagctatcaaaactgaattaggaagaaagagaaaatctgaacagaccaataactagtaagtcaattgaatcaataataaaaaacctcccaacaaactaaagtccagagccagatgacttcactggggaatctacccaacatttaaggaagagttaatgtgaattattctcaaactcttccaaaaagttgaacaggaaggaacacttccaaatccattttatgaggctaacattaccttgataccatagttggatgaggactgtatgagaaaataaaattataggccaatatctctgatgaacatagatgcaacaatcctcagcataatattaatactagcaaaagatggtccaatatatgcaaatcaataaatatgatacaccacattagcaggaggaaagataaaaataatataattatgtcagcagatgaataaaaagcatttgacacaattcaacatccttttagttaacatcatactcagtggtgtaaagctgaaattgttttctttaatattgggaataagacagggttgtccactcgcaccacttctgttcaacatagtgctggaagtcctagccatactaattaggcaagaaaaagaaataaaaagcattcaaattagaaaagaagaagtaaaattgtttctgttttcaggtgacatgatgatcttatatgtagaaaactctaaagactccactgaaaaaaaactgtaccaaaactctgccaaaaactaagaactaataagtgaatttagtaaagttgtgagatacaaaagcaacacatacaaattagttgcatttccatagagtaataacaaactatctgaaaaagaaagccacagagtgatcagacaacttacagaatgggagaaaatttttgcaatctacccatctgacaagggtctaatatccagaatctacaaggaacttaaacaaatttacaagaaaaaaacaagcaaccccatcaaaaaatgggcaaaggatatgaacagatacttctcaaaagaagacattatgtggccaacaaacataggaagaaaagctgcacatcactgatcattagagaaatgcaaatcaaaaccacaatgagataccatctccagccagtcagaatggcaattattaaaaagtccaaaaacaatagattctggtgagcctgtggagaaataggaatgctttcacactgttggtgggaatgtaaattagttcaaccattgtggaagacagtgtggcgattcctcaaggacctagaagcagaaataccatttgacccagcaatcccattactgggtatatacccaaaggaatataaattattctactataaagacacatgcacacatatgtttactgcaacactatttacattagtaaagaccaacccaaatgctcgtcaatgatagaccggataaagaaaacgtggtacatatacaccatggaatactatgcagccataaaaaagaatgagatcatgtcctttgcagggacatgggtgaagctggaagccatcatcctcagcaaactaacacaggaaagaaaaccaaacactgcatgttctcactcataagtaggagttgaacagtgagaactcatggacacagggaagggaacaacacacactggagcctgttgggggatggggggcaagaggagggagagcattaggagaaatacctaatgcatgtgggccttaaaacctagatgatgggttgataggtgcagcaaaccaccatggcacatgtatacgtatgtaacaaaccttcatgttctgcacacgtatcccagaactcaaagtaaaatttaaaaatgactaagttttatctatgcatcttataaaaaaagaaataaaacaattccaattatagtagcatcaaaaccaataaaatccttaggaataaatctaaccaagaaggtgaaagatgttaggtactgaaatctataagacattgatgaaggaaattgaagaagacacaaataaatgtctagataccccatgttcatggagtagaagaattcatattgttaaaatgcccataaaatccagcacaatctacaaattcaatgcaactcctatcaaaattccaatggcatttttcacagaaacagaaaacaatcctaaaattcatatggaatcagaaaagaccccagacagacaaagcaatcatgagaaagaagaataaagctcgaggcatcacatttcctcatttaaaactatattacaaaatggtactgaaaacaatatggtactggcataaaaacagacacatagatcaatgtaacagaattgacagcatggaatccatggaaacctccacatacacggtcaacttataatggacaaggatgccaagagtgcacaatggggaaagaatagtctattcaataaatgatgctgaaaaaactatatccacatgtaaaagaatgaaatccaatccttatcttacaccactcccaaaaattaacttgaaattgcttaacgatttaaatgtagtatctgacaccataaaactccaagaagaaaacaccgggtaaaagctcctttatatcgatattggcagtgatatttttgaacataacaccaaaggacaagcaacaaaagcaaaaataaacaaatgggactacattaaaataaaaaccttcttcacataaaaggaaacagttaacaacatgaaaaggccatgtacagaatgggagaaaatattcagaaaccatgtatcttatgagaggttaatactcaaaatatttaaagaacccatatcactcaacaacaaaaacccatataattccattaaaaatgggaaaaggacctgaatagacatttttccaaagaagacatacatatggacaacaggtacatgaaaaggtgctcaacatcacttatcatcagggaaacataaacagaaccacaatgagcgatcacctcacactttttgggatagctgttatcaaaaagacaagaaataacgagtgttcgtgaggatgctgagaaaagggaacccctatgcacttgttggtgagaatgtaagttagtacagcctttatggaaaacagtatggaggttccttaaaaaataaaaatacaactaactgccatatgatccagtgcttctacttctgggtatatgtccaaaggaaatgaagctagtatgttgaagagatatctgcactcccatgttaatagcccactatttactatagccaagctatggaagcaatctaagtgtctgtcaagggatgagtggataaagaaaatgtggtatatatacacaatagaatatttttcagctacaaaagaaggcaatcctgccatttgcaataacatagatgaaccttcagggcattatgctaagtgaaataagtcagatagagaaagacaaatactgcataatctcatttgtttgtggaatctaaaaagtcaaactcagaaagagagagtagcatggttgttggcagggggatggggatgtgggaaatggggatatgttggtccaaacttttagttgtaggataaggtatgggaatctaatgtacagcatggtgactatagttaacaatagtgtattgtatacttgaaatttgctaagagagtaaacctcaccacacacacacacacacacacacacacacacgcatacacacaaaatggtaactatgtgaggtaatagatgtgttacctcacatagtaacacatctatgtggcccatagatggccacacgcttgtgacgaggaggcctgattgcatccttaaagacatctacatgcctggaaagatccagaagcctccttcactaactgaaacacttgagttaaaatcctggaagagtccatcagagttccattctgtacctaactttactgtggtaatcatttcacaatatatatgtatattaaaaaagagaaagtgataaggtagaaacagtccaaaaagaaaaaataaagctttgcagtattttagagtaattctttaattttttgaaaactgtctgtgctcattatgaaaattcaattataaaaaatatgaagaagaaaacaaatcatctaaactgttaggcagaaaaataaaataaataacatgtagtaagtatcattttagatgtttctttatgcttatgtccacttaggaggatggctggctagctggttagttgattcaatgacaggtagatagaaagttgattgattaaaaaatttataaaaatgatatcacactatacatgttattttaacaaaatattaaaactaagtttacttgaatttaaaacaagaaaaataaactgaagtagaactttcagtcagagctactattttttcatttaatttttttgacacataataattgtacatatttatagggtacgtgtttattttattttatttttttgagacagagtctcactctgttgcgcaggctgcagttcagtggcgcaatctcggctcactgcaacttacacttcccgggttcaagcaattctccctcctcagcctcccaagtagctgggattacagatgcccaccaccacgcctggctaatctcctgtatttttagtacagatggggtttcaccatgttggccaggttggtctcaaactcctgacctcagctgatccacttgccttggcctcccaaattgcggggattacaggtgtgagccagtgcgtccagcccatattgatgttttgatacatataatgtatagtgatcagatcagggtaattaacatatccataatctcaaacacttatcatttctttgcattgggaatattttcgataccctccttctagctatttgaatctatatatgcattgttaactatagtcatcctacaatgctatagaacactagaacttgttcctcttatctagctttaattttgtatcctttaacaaatctttgtatatcgttctttcctcctacccttcccagcctctgttatcctctgtcctcctttttactcctatgagatcaactaattttagagtgagaacatgtggtgtttaactttctgtacctggcttatttcacttaatgtcttccagtttcattcatgtttctgtgaacaacaggctttccctctttttatggctgaatagtatttaattgtgtatatacaccacactttctgtctccattaaactgttgttggacacctaggttgattcaatatcttggctattgtgaatagtgctacaataaacgtggggatgcagatgtccctttgatatactgatttcctttcctttgtacagcactaattttaagaggtatctgttcctgaaagattgtgtaaagattatgggaaaatatgaaagccatcaggaggttggatttgtataaactatatgttacaattttaaaatgttacaactttaggcagtatcagttgatctctactttgaaagttgaattgattagtgctctaacactgtatcctaccttgcttccccccagctcctgattcttgtggcttatattatttttactttgtaaaatttacattctgttatgctaatataattcccataggtgttactgttgcatttaaacaagttcagtaatagccattgtttccctggttttttttttttttttttttttttgagacagagtctcgctctgtcgcccaggccggactgcggactgcagtggcgcaatctcggctcactgcaagctccgcttcccgggttcacgccattctcctgcctcagcctcccgagtagctgggactacaggcgcccgccaccgcgcccggctaattttttgtatttttagtagagacggggtttcaccttgttagccaggatggtctcgatctcctgacctcatgatccacctgcctcggcctcccaaagtgctgggattacaggcgtgagccaccgcgcccggcctttccctggttttaaattcttcattttgattcatttttagttggatggattttatttcctcccccaaaatagggtttatgggcactttactcttcaagttctttcatgtttgagaatgtctacttcttagctttataatcttagataacaggcataatgctatttcacttttttttttttttttttgagacagagtttcactcttgttgcccaggctggagtgcaatggcacgatctcggctcaccgcaacctccacctcccgggttcaagcaattctcctgcctcagcctcccgagtagctgggatgacaggcatgtgccaccacgcccagctaattttgtatttttagtagagacagggtttctccatgttggtcaggctggtctccaactcccgacctcaggtgatctgcccacctcagcctcccaaagtgctgggattacaggcatgagccaccacgcccggccgctatttcacattttatacactcaatctttctagacattttctattatattttggcatggaattctgctgttgagaatcagcctgattttttttctaccttgcatattttctgatttttttttctttcccaaatgcctgcagtggtctttccatgtcttgaagttcaataactttactaggataagtatcatggataataattctatatcgctttttcccaactatgttatgtgtccttttgctggtaagattcagctctttcactgattcaaggaaaatgtcctaaattatatcactgtatactttttacatgttgcagctctatttacttaaacaatttcccccctacttgttaggtacttttcttcagggagatgttattattatgtcttatctttgtgtgttctccttacctgtcgccttctaattgcttgaataaattttgaataaatttttccatatgcattgatatgattacctcaagcctttttacttcatgccattgatttgcttttcaggtgtgtctgtttcttttctttcctttcctttttttttttttttttttttttttgagacagagccttgctttgtcgcccaggctggagtgcagtggcacgatctctgctcactgcaacctccgcctcctgggttcaagcgattcttctgcctctgcctcctgagtagctgggactacaggccagcgccaccacgcccagctaatttttgtatttttagtagagacagggtttcaccgtattggcagggtggtttcgaactcctaacctcgtgatccgccctccttggcctcccaaagtactgggattacaggtgtgagccactgcacctggccaggtgtgtctgtctgtttctattctcagctcctgctcattcatccattagatctgccctgatgatgttctggcctcaatttattttcttaacttagcagtctctttttatctcattctgctgttttaacatctttgagcctctacttcagtgatcacatatatttattaaggtctcttacagtgaaaagtacttttaggaaaacaacttctattctgaatgttatgtttgccttttgacttggttcttcaagtcttagccatgttctctttctttcttttttcctttcattgttgttattgttggagcatgtttctgtagttgctgtaacagtttaatcttgctcattcttaatatgagttgtttatttaaaccctaatgtttgttctcacatactgtggttgaattttcatcgatattctgccttatttgatatgctatttttctctttttaggctagtatttagtgcatctacttttcagttgcccggaagtgtagggttgcggggaaaggaagggagtagattctaccgcagctgagtgaagtttgttaaggaggattactctttactctgaatactcattagatgtcctggaccagacaacatcccgctaagctcaggatttaccagtcttctggaagttggcatactcccctggttgagctcagtgtcctgaaagatgacaagttctgttggcccttaactctgctaaaatggtatgtggggcttctgctcttcatggcttttcagtacttttctttaggttgtcttctcaccctcttgatttgcttctccccagtatgaaggtgttatttggaattttaaggatttactcaccctgtttcttgagtactgcttctatgggatggggttgaaagccacacagaaccatcataaaacagaatattttcctttcttttcctgcctctaacctttaaaaagtttttagctaaggttttatgccattcatttcttttattattgctgataaattttggttctttctttgctgccatccccgccccctttttctgaggaataaaaggccaaattctttggaaaatttagtttattgtgaatccatatacaactgaagtaattaacaagtataattcaggggtcattactatttctcacactattcattttcatgactttgtataattgtctaaaaatcctttaatagacatgtatttttctttttcttttcttttctttttttttatgacagggttttccttggtggtgttttaagccactaaagtgtggtaattagttatgtagcaacagttaacaaatataatatatgaatttttacaggcacttttagaattaagtgacttattttattttaattaaatctgattttctctcttaagggaaactctcttttttgtttaataataatatcctttctcaaagaggaggctttgctactgtgtttccaaacttggttgaattttgttgctttcttcccccctctctcttttatctacttctctccctcaatgctgagggcagaataaggaatttaagttgtttattgttcctaactgtaagtgtagcttagaaacactgatggaaatggtttaaaagtgtattggaaccccactgtaacattggttttagagaacaggttagcatctaggttaatggcaaatgataagttcagtgtattgttaaaaatttacttttagtatttaaaaaaacctgatttacatacatccggaacactgcacaaatcataactgaatagctcacttactttctacaaggtgagcatacctatgtaacacacccagaggaagagaaagaacattttcagaactccaagctttcctcctgcaccctcattgcttaggacttcctcttccccggaggtaactgccattctggcttctgtcaccagcagctagttttgcctggttttgaatagtatgttcttttttgttttttagcttctttagctcgagcttatgtttgtgaaaatcatccatgttgacaagcagtagtgggttcattctcattgttttatagaattccattgcataaatatgccacagtttatgtacttattctactattatagagttatactaattttacttctgtagagtggattagtttcatttggagctattaccaacagtgctgctataaacttttgtatgtgtattttggttaatgttcattatatacttggaattgctagatcatagagtgtgtattatttagctttaatagatattacaaatagtttcccaaagttactgcatcagtttacattcccaccagtaatgtgtgagaatcacaattgtttcatatcttcacagaacacttggcattatagtttttatcatcatcatcattaattttaaccactctgatggctgttagtgacatttcattgtgctaatctgcatttttgtcatgactcgtgatgttaaacaccttttgatatgtttggtgaaggtgagtaattttcaaactttaggccttgatccattaatgggttatgaaatcaatttagtgagttaaggccagcatttaaaaagtctgaaatagaatagaagagagtagataatggtttataatggtaaatacagatttgtgaaacttttgtttaatttcctaaatataaatatacacacatatcagtttattatataaaatgttatatttctttttgtgaaccatggtcaaaaaggttttaaaaaaccttgttgtgtattatgcatttaagaaaaatctacaacttgattaaaatataaagaccacacatatctcatttagcacaggactgggaaatctaatagctgagataatggaaacatgattcataatgattttgttaggctaaactggaagcaaactgttcagatgaaatatacagtaaagtaaagcccttcatgtggtaagtataaagtccttgtaattgaatgggagaaggctgctttgacagcagtgtgggggataaagacccagaacagtcaatcctaaacacaaagttctaggtctccaatccttgaatgagaatagtggcttgggaatctgcatgtttctaaagctcctgagtgattctgataatctggcagtttcagcagccactgacatcagccggagattctagtggattttgccaactgcaagggaggaatctcctggaggaggtgttctaagtgtgtgaacgctttttaagctgaacgctctaaaaaaccaccatatttcagaataattctacctagtttcttttactccctaaattatcattctatagcagtgaaactcagaagaagccatttaattaaagaaccattatctaccatttctatacagttagaatggaagacaggcagcagagttaatttacttccgatccctctctatgcagattataactccctaatcctctttttctctgaacctgtacttcaatggcacccctattgtgagttgcatatattcctcaattatataatacttcagtgctttcgtctctgagatttactgtactttaacattcgtatgcattttacagtaaaattttgaaggctttataagcatcctgctttctaattaacagtgaggataaaatgttagtgtgattaaatattaaacatgcatacttaaggaatgttaaaaatcagtctagttttttttttctttttttctttctcacccttgaaggtaagatttatcctatacaaggtttggaagaatgaatgtataatttagagaaacacttccctgaataccaatattactttatgtagtaattatgggattttaaaggccaatgagttctttttcttttgtataaacttatgaatgtattctaataaagtacttttgacaagctaatcaaataaaacaatgtaagatttaattatcagctttctaaagattttatgaaccagattgtttctattgccagaatcatataaattaggaatctcagaatcctcttaaatcttttattttgttcttaaaatagtgttttttttacatgctcactacaaaaatatcaagcatagaaaatatagaggaaatttaaaatcattaaaatttcttcatctcaggtaaaactactattgatattttagttgatattcttgtagacatctgagcatacacagacatgctcacacaagcatacacccagttttatatagaaaggttaataatatatgttatatgatattctattacttatctttaagagctatgtgtttttaatccactcttctgttgtttctgtgttagtaaatacagacgtacatcatcatttttaatggctgcattatacatattatatacagtatatatatatatcatatctaatctcctattgataatacttagattgcattctttttcctctattatgtgtttagtaacatgtctgcacattagtcattttgcatttgtacaattatcttcttaagacaaaatcctagatgtgtgataattgccaaactgtcttccaaaattatttcagttgacattcccaatagcaacgtaatagaatgattgctttttcagttttctaatattggattttgtctttcttaaatatttgcaaatgataaaaatgtgtcattttaaaatgtgcatctctttattaatgaagttctgaatatttttaagtgcttattggtcattagtttctttctctctctctctctctctctttaaaatagagatagggtcttgctatgttgctcaggctggtctgaaactcctggcctcaagtgatccttccaccttggcctcccaaagtgctgggattataggcatgagccactgcgcctggctttgtccattagtttttcttctttgatcaattgcttaaatatttttattgggatggttggctttttgttttttcttttacaaactctgaagttcttactatgggatggctgtgttttgtattgacctgtaggaaatctgtgaatattgtgatattgccatttagatttctagtttatgatttgacttttaactcttcacagaatgatttttgaattaaactaaatgttgcttataaatgtcacttatttattttgtttgttacaaacatttattgatgtttcattttgtactttcaagcttttgtattatagttaagaatggcctttgtcatctcagaattgtggaaatacttgccaatattttcttagggtttaatttttttacatgataatctttgatccatgtgagatttatatttaatcaaacgataagaagccagtaatacttttacctcaattgctggccagttgtgagacttcaagaatatccaattttttactagtgatttaaagtgactccttttatattgaattcccttatatatttgaatcaatttgaacctatcttgttttattgatatctttttgaataattattttggggcttttatttctgtggctttatacttttttttaatgggataagtatcccttcattattctttttcagattatctgtacatttttgcatgttgacttggtgagctttaaaatcgttaacaaaagccatgccagtttattcattgggggttatatggtatttatagattgaggggaaataggtacttttataatactagaatttcttattgaaaaaacaagttttttcccccatggatttaagtattttaaaaaatgtacctcagtagcattttgtattttcttcatatagactgtaggtattatttttaaaaagctttttcctaggtgtttttagttgttgttaattgcatcatctccacactattttctgattgttaatggttaaaacaaaatattaacttttgtttatttattttatatccagacacgttagtaagcactcattttttttctagtaatatttcagttgattttagccttatgatgtctcaccaggtggaagtgaggagcctaagaagtaaatataactaccttattgtaggatgtcttgaaatcattagagaatggtgcctaatgtagaacagagtttatgaaatataatttgtacatccagggcagactgaatatggactaatcatgattgaaatataatgtgtcagcctaagtgtactagaatgaataaacataccatttaaatgagattatctaaaattctgaaatgttctttgtactctattaatctctccggattaatctttgtgaattctgtattatttacttagccaggaaaaagatgggattgttatttaagtgggaaggcatagttctagtaaggaaagtgtgaagaaatgggagagaaaacagatttcctcaaaataggagtttactaggttgtgaattccaggcatgctaattttttaaatgctccacaaataaaatacaaccttttttgtcataatttttccaacataatacctgttacttcaaccacctaccctattgaaacaccccccttcccagtaagtaggtgtaaaatgatctgacaatgccatctggtggcctcctggggaattgtgtaaagtaacctctacctgctggacttcactccttggtgaacctgaggcaccatcctgggctcatgtcttggatgccacattgaggcttgagagcaggcatttatgctggggctgtagacaaagaaagacgagaaatcaaaatccatgtctgggaaaggctgctggggaaataaggaaggtgcccaaaaggccacattcacaggagctggttgagaacaaggactagatttttcttttccctccctcttcccttttccctcttccttactccttcactccctctcttcttctgagttactttcccccgcactgcccgcctttttcttagctcttattcttgcattctcaggaaagcctccctctttctcttccctcattctgtttgggagccacatcataatcctaactacagctgataaatctaagggtagtgcttgtaggtcagctttattaaggaaaaggggaggcggaagtttgcaaatgaagaaccagcgtcatgaacgcctggctccttggaagggatcagaagttcccttcaacattaccatggcctcaggttttccccttcatctgacatgatttccccatttgcctgcacgcaggattttcgtctcttctactcactgtcctatccccaacacctggaacagaacctgtccagtaaaatgagctccattaatacttattgaaggaaagaattctagagaagtaagaacatctggctcattattttttactatatttcagtgttgtcttcctgtaagtgttatagtgatgctaattttcattgtgaaagtatgattttggacttttgtgggataatttaagtattaaaggatatttctagcagaaattgttttttgagttctaacctactaactgactaactttcagaaaataacctgttggtaagttagggactctctgtatctttcctttttatgtttcaagaatgtatcttttatacacataaaggaagtaaaaacaacaacaaaatgaccagttttttttctgtctttgcttctcaagtgctcctagctttccaaaaaagactctacgactattaaatatgaggaaaacacaggtttgaaaagctgaaaaatattaagcatttggcagaacatcttttctgtatatgttttctctgtgtgcacagacttgtttgcattacaaatccttgatcacagacttggagtaatatttattccctctatagaactaagcacagagaaaatgttggatttccctaacatttttcagaattgcacccttgttttgtgattctcctaagaactggagagagaagtcaggctgcttttatttcttagattgttcctctgacattgctgttgtgtgagaattttctgtgggcaaaataataacaataataatgataataataatgatcattttttgctaaccatttcaacactctaggattcccaaattatctcacgaatctgtgtgatcttaaagaaatgcttttgctgtaatgcaaagggaaagctaaaatgaattaaaagctggcctaaattaagacagctggggtgatcactgggtgtataataccagagtgtggtagaccttggttaagttttgagaatgtgtcacaacatcctacatcagagttgatatgttgtcctggttgattttggtggctgtggtcatggggacggagagctttttaaactttgttgacttcgtggattgtgaaaaactataaggcatgcacaaagcatggactgactttagagtcagagggctctcaggctacaatctggcaatgcctctgtgtgacccggaataaaataggtaacatctcagagccttagtttacctttctgcaaaatgggagtaatgatgcctacctagaagggctgttgcgaggactggcgctggtacctggctggcaggacttgcttggttgaccagttatgatcacggtgttcatctgttatctttccatctctccactaggtaccttgggatcacaaggcccctcacataccctgtgaggcagaatgggaaatgcatggcgaagatgattctctccgtctggcttctctccgcctccatcaccttacctccactctttggatgggctcagaatgtaaatgatgataaggtgtgcttgatcagccaggactttggctatacgatttactctaccgcagtggcattttatatccccatgtccgtcatgcttttcatgtactaccagatttacaaggctgccaggaagagtgctgccaaacacaagtttcctggcttccctcgagtggagccagacagcgtcatcgccctgaatggcatagtgaagctccagaaggaggtggaagagtgtgcaaacctttcgagactcctcaagcatgaaaggaaaaacatctccatctttaagcgagaacagaaagcagccaccaccctggggatcatcgtcggggcctttaccgtgtgctggctgccatttttcctcctctcgacagccagacccttcatctgtggcacttcctgcagctgcatcccactgtgggtggagaggacatttctgtggctaggctatgcaaactctctcattaacccttttatatatgccttcttcaaccgggacctgaggaccacctatcgcagcctgctccagtgccagtaccggaatatcaaccggaagctctcagctgcaggcatgcatgaagccctgaagcttgctgagaggccagagagacctgagtttgtgctgtaaggtcatttatcactattttccttttatcccccaaacccttttatgcagctttttgaggcacatcacagaaagcttcctgaacgagtagctagcttagtttttactaaacataccagatttgaattgacaacagtatagactccagtcttccacccagtaaaattccaaaagccaaaaataggtacttagttggattggtagatgagactaatttgctgatgaattgcaattgatgtgattgacaacaaggcaggtgatattttcccttctttctccataaatgacatccaaatgatatccttacatctgaatttgtgtaacattattattttagttgttattattcttctgtccagtaaagcttttttgataacctcatccttcacagataaattcttcttttgaggtaggaggcacaatgatctttttagtatgcagttacattcacctgggctgaaaggaggcagcccaggaaaaagaagagttgttagtgtggggagatgccaggatgaggcaaggtcttaaaagctacaagagccggacatggtggagcgcctctgtaatcctagccacttgggaggctgaggcaggaggatagcttgagcccaggggttggattatgcagtgagctatgatcatgccactccaacctggttgacagagcaagactcgcctctaaaaaataaaagaaaaagagccacaggagcttttaggaaatgttcctgcccatcttggcaggtgagaaccaagaattggtctaagaagtcttagtgactttcaaggaagcaattacaataggttcttgggatctgaaaaaggatctgatggtgatagagaaatggaaatttcagaagtgacccacatgttaaaaatttggcattgtaaagaaggaaagagatagtatactagttagaggtgtcaacatgtctgatgaagactttgttttaaatgtgaggtagaggagatttcttcacgtttgaaagtcaggggaaaaataaacttggaatgaaaaattggaaggttctggtgagagaatgagcagattagtgttggaggtgtcgttcttcactgagcctggcagggaggagtagactagagaaccagggaccactctagcagagagggaccttcctggtcatcttgtccacccctgtctttcaacagaagagctaactgggagttgaaaagtgagatgtctcacacttagctagtgtcacaactaagtctagattccacatcatctgaatcccagtgctactcatttttcttatactggactgcctttatcttacaactgaaagttggaagactacagctatgctaattcttaagctgagtgtagcttcacaggcattcatgtttacttctatatactcttttgtacacgagattgttcacaatataaaaagtagcattaaaaaatgtaattttaagttctagaacatgtactgtaagcaaacccagagatcttactatgcctataagagttcgttgaactgaccattaggattttgaattccttcagagaaggaacaatgtcttaatcagatttctttctgcagaatctagtacagtgcttgacacataatagatgataaataaaagtaataactgctaaccattattgaacacccgctacatgctatgcagcatgctacctgcaaaataggtgcttctagcatccccacttttcagaagaacaacttaaggctcaggaacaaaagtaactgacctatgttcacacagtccctaagtggtagctgtgatatgaatcaccccgatgcttgtattgaatgttatgcagttatacttgtcaagtgacttcagtatataggcagtgaagagtctcagaatatttttgagctggagactagccataagctctctaagaagacaatgagaatgaattgttactctaagtaagtaaagtttattagacttactgcactacgagtggtatccactcctagacagtcttagtagtttctcagatgaaggaaataaggcaaggatattgatagggttttggggcttgggctgggtgatttgaaggtagggaactggtgaggattaggcagagtttatgacataatagctttagactggtaagtacagctagatgagggctgtgaagtgagtgttaatgagcaaactagtcttgataagtaggctatttttgttggcatatagtcttctgaaagtgactatttcctagaacaaatagctaggttattttgcctggctgcagcattttttagcacaggaaaaggaaagcgtgttggttttagttctcaggagtaacatgggaaggtctctctggcaatagtgaggagggcagacaagggaaagatgggtggcaggggatccagttaagcagccagtgtataaagtaggaaagaacagataaagtcatgagcaaggaaacactgctatatttgcatgcatccatagggtcaaaaaacttgagaatcattttattgattattttagttaatgattcatagataattcagatagatcataaaatggtaatctttaaaatgtagcacaaaaaggttttccagtttaaaataataacatgcgtttgctgaggattcactctcagacactttgctgagcactttatgtgaatttgatcaattaatcctcaaaagtttatgataggttagttttcttcatttccattctgaaaataacaaaacaagggcgtggagaagtcaaatgatttcccccacagtcatatagagagtgatagagctggatttgagcccaggacatctgtgttcaaaagtgcttttaacttctatgctactgtgccttttataaaaataaatcagctaacataaagtctaaagatatttgcctttgtatctttagctagtctggaggcttgggtgttgttttcctgtaagcttaagacagaggtcagcaaactttaactgtgaagggccaagtggtaaatattttaagctttgctagccatatggtctctattgaaactactcatctcactgatgagtaatttgtcactgacataagtaaacagataggcccgtgtaccaataaaactttatttacaaaaaggggctgccagttgtatttggccaacaggccatagtctgctgtatcttctttgcatttctctcagtttgaatttataattacagaatatctacttcattaaggatgattagcctaaaaatatccatcaactttaggaaatttctaatatggctgccatgcattgaggaagatacagaaaacagatgatatctttcatgtccttatgcacataattttgttggatataccttacacaaacagacatatgttgctatggcctgaatgtttgtgtctcctgcaaaattcatattttgaaaccaaattcccaatgcaatactatgaaaatgtggattctttaggaggtaattaggtcatgggggcagggccctcatgaatgggattattgcccttataaaagaggcctgagggagcttgttcataccttctaccatgtaaggaagcagctagaagttaccatctatgaagcagacagcgagccctcaccagacatggaatctattggtggcttaatcttggatttctcagcctctcaaactataagaaataaatttctgttgtttataagctaccaatttatgggattttgttatagcagcctggctaggctaagacatatgcacatggcaacctttctgtaataaggaaaggtggagacaggaaaaactatgggattcaaaggaaaggaaaataactcagagcttacactaaccctaatcagagaagacttcctgaaggatatgaactcaagcatgtctatgaagttggtcaaagcatttatagtgaaaggagagcagaaatggtattctaggtgaagaggactttttttgtaaaggcaccaatgtgggagcttatacaaaggaccatctggctgaagctaagcatttgggtgcaggaactgttagagatcaaagcagaaaagtagattgagatgaaattataaaggctcttctatgctagctccaagaatttggacttttaatattgacaaatggttcttaatcaggagtaattttgcctcccatcccaactctctgtagccatttggccatttctggagggatttttggttgtcacaagtctgggtggcacactactggcatctactgggtagaggccagggctgctcttaaggattttacagtatacaggccagcaaccccccgcccaccccccaacaaagaagtacctaatccttaatgctaaatgtgggacactctgtagtagtaagccatcagtgaatctgcaagtaggatcagtgaatctgcaagtaggggaatggagtcatcaaaatggtcaagactgatgcagtagcactgtgtggataactccaaatgtagaaaatggatgtaaggagtctcttcattggcttgtttttcccagaaacatttgagggtctgctatgtacaaagcatggaaccaggcatggtagggtagaaagatgagtaagggacagttgaagtctctggaagcttttaatctagtgtgctggggtggctgcagaggtggtggtggctagtaggagacttgtaatcagaaccctttgctccccctgcctctctctagctctcactcatcttgtggccaccgtgcagattctggactcctccagactcagggctttctccagctcttttcctcccatctagcttctgggcttctagtctctcttaccttttcgccttgctctgccttcttggctctacgtattctcctacataatagtttctttctttcctgtacaaacctgtaagactgttcctactcccaaatatttacccatttctccccattttcttgatcagcataaccagaacctcaggagttcatcaggcactcgaaaattttccctggggtaatgaagtgaatagatggaggaaaagctgtgaatacttttgcactggtaattttaatttactgctatcaattttaatccttttcacaagtattcacagattggtaatataaaaccaaatatgataatgaaatataatcaaggattctttttttcttttaaaatttgatttacttatggatttgctttgaattgccataaattgcaggagggcctgcacaaggagggtgctgttgagaccagaaaagaggccaccggtatctgtgtgggtgctacaatctccagaccatcacaattggttagcaggtgggtagcaaggaaagggagactttggagatagtgctgtggtctggaggaattcagaacatgaactatgtgagcagagccgtgctgagctggagaaagcactgtctctcctgtgctgggaagagacagtggccctgggctaggaatgtgtctgtggagcacagatggttgccagtcccctcttcagatacgtggagcctagagtgctgagtctgggctgaagtgcagtacttgtcctcaggtgttattgtgtgaggctgaggggaaaagctagaaaccatgtctccagcaaaatccatctattgatcacccatctgaagggctgggctgagagggggacctcaaagaaggaagagcaggactgcaggcaagacagccaaatggcagggtagggggtgctttagatggggtgggtaggtggagattaggggcacagtcccagtctctgggtcctcatagacctagctcttaggcacatgatgtagtgtggtaagttgaggcctgtggaggtgcagagtcaggggagtggctttacaccaggagaaagggactttttctcagcccttggctgacacttctctatcactaatgccacttctgagcatctaggaacgagggagagaagtgaagtttcttggtccctacacacataccttacaataacacaccttcctaggtttgagggagagagcacgtctcattggtaatcattatttagtcattattcttttcaagtggggcaggtgcaatagtattttgcaaggatttttgagagcaaagtcattttttgctatagctgtattaaaaaggtgaatttctaaatgggttatttggggctgatttgcaaatatattaaagccttggcaacttgtggaagttatgaaatttatgaaaagagtcacaacactttttctttcccttgaaggatactcataatcccttaaaagccacaaatgattcaaattactgactgctgtaaaaattaagtccacctaccacaaaatgaaaactcacatttacagttctactaaattattttctatttttctctctcttttttttagacaaaatgctgactactgtagaaaaaaaggtcatgattcatgattgaaagcagaacaatggagatgaaataaacaaggcaaaatagaggtggaaacagaaggaagtcatttgctgagtctgcagaatggaatgcagcttctgtcctttcttgggatgtctaaaacatgacaaacagggtgatctgttgtacacactatcttatgagggagatggtgacttctccttttttctgtggatcagtgctattgtgtgttctcagtttaagatagcagatcatctcagcagtaagcacaccaacagaactgagttccagaaaggaagcagtttctggtgctttgcatatgtccaaatccatgcaagtgggagaaagttccagtgcacacttcccatgcttctgagtctaggcgttgtggtgaatatgcaggaatcattcatgagacagaatgtattttgttgtatgacagaaggcttttccaagcaaactgcggtgagcgtagtgttgaatatgttgcatgtccatgttagaaaacagaatccagtcatcagctaatacaaatgatttcccagagcagtgtttgtttcaagcttctgtcaaatagtttggcttttctgcagggtctctgtgatttccccatctatgtacttttctgtgttaactcacttattatggtataactcaggaacaggtctcaggatggagagaagcatacaacatgagcaaagctttttctcgtgctctgaagggtcttgagaggggagtgggatgccttctgtgaggatttttatcgcagtgaagctcaagtggtacccaactgcgttgtaattaacatgattattggcatgtttttgactctcattttctacaaggctgcagtgggcccacccatgggctggcccataac

SEQ ID NO: 18 - DNA, 2454 bp, Homo sapiens
aggcgtccgtcgggggccgaagcgcctcccgcagggagtccccgtgaggccgcgctgccgcgttacccgcagcggccgggggtccggggagtgcggggctccgagacagagccaggcgccccccagcggtcggcgcgggccccatggctgggccgggcggagcggaaccggtgaggtgaagccccggggccggcagccggaggcgcgtggccggggcgccggctccatgggcagcggcacacggcggcgcgatgatggacgttaacagcagcggccgcccggacctctacgggcacctccgctctttccttctgccagaagtggggcgcgggctgcccgacttgagccccgacggtggcgccgacccggtcgcgggctcctgggcgccgcacctgctgagcgaggtgacagccagcccggcgcccacctgggacgcgcccccggacaatgcctccggctgtggggaacagatcaactacggcagagtcgagaaagttgtgatcggctccatcctgacgctcatcacgctgctgacgatcgcgggcaactgcctggtggtgatctccgtgtgcttcgtcaagaagctccgccagccctccaactacctgatcgtgtccctggcgctggccgacctctcggtggctgtggcggtcatgcccttcgtcagcgtcaccgacctcatcgggggcaagtggatctttggacactttttctgtaatgtcttcatcgccatggacgtcatgtgctgcacggcctcgatcatgaccctgtgcgtgatcagcattgacaggtaccttgggatcacaaggcccctcacataccctgtgaggcagaatgggaaatgcatggcgaagatgattctctccgtctggcttctctccgcctccatcaccttacctccactctttggatgggctcagaatgtaaatgatgataaggtgtgcttgatcagccaggactttggctatacgatttactctaccgcagtggcattttatatccccatgtccgtcatgcttttcatgtactaccagatttacaaggctgccaggaagagtgctgccaaacacaagtttcctggcttccctcgagtggagccagacagcgtcatcgccctgaatggcatagtgaagctccagaaggaggtggaagagtgtgcaaacctttcgagactcctcaagcatgaaaggaaaaacatctccatctttaagcgagaacagaaagcagccaccaccctggggatcatcgtcggggcctttaccgtgtgctggctgccatttttcctcctctcgacagccagacccttcatctgtggcacttcctgcagctgcatcccactgtgggtggagaggacatttctgtggctaggctatgcaaactctctcattaacccttttatatatgccttcttcaaccgggacctgaggaccacctatcgcagcctgctccagtgccagtaccggaatatcaaccggaagctctcagctgcaggcatgcatgaagccctgaagcttgctgagaggccagagagacctgagtttgtgctgtaagacaaaatgctgactactgtagaaaaaaaggtcatgattcatgattgaaagcagaacaatggagatgaaataaacaaggcaaaatagaggtggaaacagaaggaagtcatttgctgagtctgcagaatggaatgcagcttctgtcctttcttgggatgtctaaaacatgacaaacagggtgatctgttgtacacactatcttatgagggagatggtgacttctccttttttctgtggatcagtgctattgtgtgttctcagtttaagatagcagatcatctcagcagtaagcacaccaacagaactgagttccagaaaggaagcagtttctggtgctttgcatatgtccaaatccatgcaagtgggagaaagttccagtgcacacttcccatgcttctgagtctaggcgttgtggtgaatatgcaggaatcattcatgagacagaatgtattttgttgtatgacagaaggcttttccaagcaaactgcggtgagcgtagtgttgaatatgttgcatgtccatgttagaaaacagaatccagtcatcagctaatacaaatgatttcccagagcagtgtttgtttcaagcttctgtcaaatagtttggcttttctgcagggtctctgtgatttccccatctatgtacttttctgtgttaactcacttattatggtataactcaggaacaggtctcaggatggagagaagcatacaacatgagcaaagctttttctcgtgctctgaagggtcttgagaggggagtgggatgccttctgtgaggatttttatcgcagtgaagctcaagtggtacccaactgcgttgtaattaacatgattattggcatgtttttgactctcattttctacaaggctgcagtgggcccacccatgggctggcccataac

SEQ ID NO: 19 - protein, 424 aa, Homo sapiens
MMDVNSSGRPDLYGHLRSFLLPEVGRGLPDLSPDGGADPVAGSWAPHLLSEVTDAPTWDAPPDNASGCGEQINYGRVEKVVIGSILTLITLLTIAGNCLVVISVCFVKKLRQPSNYLIVSLADLSVAVAVMPFVSVTDLIGGKWIFGHFFCNVFIAMDVMCCTASIMTLCVISIDRYLGIWLTYPVRQNGKCMAKMILSVWLLSASITLPPLFGWAQNVNDDKVCLISQDFGYTIYSTAVAFYIPMSVMLFMYYQIYKAARKSAAKHKFPGFPRVEPDSVIALNGIVKLQKEVEECANLSRLLKHERKNISIFKREQKAATTLGIIVGAFTVCWLPFFLLSTARPFICGTSCSCIPLWVERTFLWLGYANSLINPFIYAFFNRDLRTYSLLQCQYRNINRKLSAAGMHEALKLAERPERPEFVL

SEQ ID NO: 20 - DNA, 1661 bp, Homo sapiens
aggtaccttgggatcacaaggcccctcacataccctgtgaggcagaatgggaaatgcatggcgaagatgattctctccgtctggcttctctccgcctccatcaccttacctccactctttggatgggctcagaatgtaaatgatgataaggtgtgcttgatcagccaggactttggctatacgatttactctaccgcagtggcattttatatccccatgtccgtcatgcttttcatgtactaccagatttacaaggctgccaggaagagtgctgccaaacacaagtttcctggcttccctcgagtggagccagacagcgtcatcgccctgaatggcatagtgaagctccagaaggaggtggaagagtgtgcaaacctttcgagactcctcaagcatgaaaggaaaaacatctccatctttaagcgagaacagaaagcagccaccaccctggggatcatcgtcggggcctttaccgtgtgctggctgccatttttcctcctctcgacagccagacccttcatctgtggcacttcctgcagctgcatcccactgtgggtggagaggacatttctgtggctaggctatgcaaactctctcattaacccttttatatatgccttcttcaaccgggacctgaggaccacctatcgcagcctgctccagtgccagtaccggaatatcaaccggaagctctcagctgcaggcatgcatgaagccctgaagcttgctgagaggccagagagacctgagtttgtgctacaaaatgctgactactgtagaaaaaaaggtcatgattcatgattgaaagcagaacaatggagatgaaataaacaaggcaaaatagaggtggaaacagaaggaagtcatttgctgagtctgcagaatggaatgcagcttctgtcctttcttgggatgtctaaaacatgacaaacagggtgatctgttgtacacactatcttatgagggagatggtgacttctccttttttctgtggatcagtgctattgtgtgttctcagtttaagatagcagatcatctcagcagtaagcacaccaacagaactgagttccagaaaggaagcagtttctggtgctttgcatatgtccaaatccatgcaagtgggagaaagttccagtgcacacttcccatgcttctgagtctaggcgttgtggtgaatatgcaggaatcattcatgagacagaatgtattttgttgtatgacagaaggcttttccaagcaaactgcggtgagcgtagtgttgaatatgttgcatgtccatgttagaaaacagaatccagtcatcagctaatacaaatgatttcccagagcagtgtttgtttcaagcttctgtcaaatagtttggcttttctgcagggtctctgtgatttccccatctatgtacttttctgtgttaactcacttattatggtataactcaggaacaggtctcaggatggagagaagcatacaacatgagcaaagctttttctcgtgctctgaagggtcttgagaggggagtgggatgccttctgtgaggatttttatcgcagtgaagctcaagtggtacccaactgcgttgtaattaacatgattattggcatgtttttgactctcattttctacaaggctgcagtgggcccacccatgggctggcccataac

SEQ ID NO: 21 - protein, 245 aa, Homo sapiens
MAKMILSVWLLSASITLPPLFGWAQNVNDDKVCLISQDFGYTIYSTAVAFYIPMSVMLFMYYQIYKAARKSAAKHKFPGFPRVEPDSVIALNGIVKLQKEVEECANLSRLLKHERKNISIFKREQKAATTLGIIVGAFTVCWLPFFLLSTARPFICGTSCSCIPLWVERTFLWLGYANSLINPFIYAFFNRDLRTYSLLQCQYRNINRKLSAAGMHEALKLAERPERPEFVLQNADYCRKKGHDS

SEQ ID NO: 22 - DNA, 2449 bp, Homo sapiens
aggcgtccgtcgggggccgaagcgcctcccgcagggagtccccgtgaggccgcgctgccgcgttacccgcagcggccgggggtccggggagtgcggggctccgagacagagccaggcgccccccagcggtcggcgcgggccccatggctgggccgggcggagcggaaccggtgaggtgaagccccggggccggcagccggaggcgcgtggccggggcgccggctccatgggcagcggcacacggcggcgcgatgatggacgttaacagcagcggccgcccggacctctacgggcacctccgctctttccttctgccagaagtggggcgcgggctgcccgacttgagccccgacggtggcgccgacccggtcgcgggctcctgggcgccgcacctgctgagcgaggtgacagccagcccggcgcccacctgggacgcgcccccggacaatgcctccggctgtggggaacagatcaactacggcagagtcgagaaagttgtgatcggctccatcctgacgctcatcacgctgctgacgatcgcgggcaactgcctggtggtgatctccgtgtgcttcgtcaagaagctccgccagccctccaactacctgatcgtgtccctggcgctggccgacctctcggtggctgtggcggtcatgcccttcgtcagcgtcaccgacctcatcgggggcaagtggatctttggacactttttctgtaatgtcttcatcgccatggacgtcatgtgctgcacggcctcgatcatgaccctgtgcgtgatcagcattgacaggtaccttgggatcacaaggcccctcacataccctgtgaggcagaatgggaaatgcatggcgaagatgattctctccgtctggcttctctccgcctccatcaccttacctccactctttggatgggctcagaatgtaaatgatgataaggtgtgcttgatcagccaggactttggctatacgatttactctaccgcagtggcattttatatccccatgtccgtcatgcttttcatgtactaccagatttacaaggctgccaggaagagtgctgccaaacacaagtttcctggcttccctcgagtggagccagacagcgtcatcgccctgaatggcatagtgaagctccagaaggaggtggaagagtgtgcaaacctttcgagactcctcaagcatgaaaggaaaaacatctccatctttaagcgagaacagaaagcagccaccaccctggggatcatcgtcggggcctttaccgtgtgctggctgccatttttcctcctctcgacagccagacccttcatctgtggcacttcctgcagctgcatcccactgtgggtggagaggacatttctgtggctaggctatgcaaactctctcattaacccttttatatatgccttcttcaaccgggacctgaggaccacctatcgcagcctgctccagtgccagtaccggaatatcaaccggaagctctcagctgcaggcatgcatgaagccctgaagcttgctgagaggccagagagacctgagtttgtgctacaaaatgctgactactgtagaaaaaaaggtcatgattcatgattgaaagcagaacaatggagatgaaataaacaaggcaaaatagaggtggaaacagaaggaagtcatttgctgagtctgcagaatggaatgcagcttctgtcctttcttgggatgtctaaaacatgacaaacagggtgatctgttgtacacactatcttatgagggagatggtgacttctccttttttctgtggatcagtgctattgtgtgttctcagtttaagatagcagatcatctcagcagtaagcacaccaacagaactgagttccagaaaggaagcagtttctggtgctttgcatatgtccaaatccatgcaagtgggagaaagttccagtgcacacttcccatgcttctgagtctaggcgttgtggtgaatatgcaggaatcattcatgagacagaatgtattttgttgtatgacagaaggcttttccaagcaaactgcggtgagcgtagtgttgaatatgttgcatgtccatgttagaaaacagaatccagtcatcagctaatacaaatgatttcccagagcagtgtttgtttcaagcttctgtcaaatagtttggcttttctgcagggtctctgtgatttccccatctatgtacttttctgtgttaactcacttattatggtataactcaggaacaggtctcaggatggagagaagcatacaacatgagcaaagctttttctcgtgctctgaagggtcttgagaggggagtgggatgccttctgtgaggatttttatcgcagtgaagctcaagtggtacccaactgcgttgtaattaacatgattattggcatgtttttgactctcattttctacaaggctgcagtgggcccacccatgggctggcccataac

SEQ ID NO: 23 - protein, 437 aa, Homo sapiens
MMDVNSSGRPDLYGHLRSFLLPEVGRGLPDLSPDGGADPVAGSWAPHLLSEVTDAPTWDAPPDNASGCGEQINYGRVEKVVIGSILTLITLLTIAGNCLVVISVCFVKKLRQPSNYLIVSLADLSVAVAVMPFVSVTDLIGGKWIFGHFFCNVFIAMDVMCCTASIMTLCVISIDRYLGIWLTYPVRQNGKCMAKMILSVWLLSASITLPPLFGWAQNVNDDKVCLISQDFGYTIYSTAVAFYIPMSVMLFMYYQIYKAARKSAAKHKFPGFPRVEPDSVIALNGIVKLQKEVEECANLSRLLKHERKNISIFKREQKAATTLGIIVGAFTVCWLPFFLLSTARPFICGTSCSCIPLWVERTFLWLGYANSLINPFIYAFFNRDLRTYSLLQCQYRNINRKLSAAGMHEALKLAERPERPEFVLQNADYCRKKGHDS

SEQ ID NO: 24 - DNA, 2547 bp, Homo sapiens
aggcgtccgtcgggggccgaagcgcctcccgcagggagtccccgtgaggccgcgctgccgcgttacccgcagcggccgggggtccggggagtgcggggctccgagacagagccaggcgccccccagcggtcggcgcgggccccatggctgggccgggcggagcggaaccggtgaggtgaagccccggggccggcagccggaggcgcgtggccggggcgccggctccatgggcagcggcacacggcggcgcgatgatggacgttaacagcagcggccgcccggacctctacgggcacctccgctctttccttctgccagaagtggggcgcgggctgcccgacttgagccccgacggtggcgccgacccggtcgcgggctcctgggcgccgcacctgctgagcgaggtgacagccagcccggcgcccacctgggacgcgcccccggacaatgcctccggctgtggggaacagatcaactacggcagagtcgagaaagttgtgatcggctccatcctgacgctcatcacgctgctgacgatcgcgggcaactgcctggtggtgatctccgtgtgcttcgtcaagaagctccgccagccctccaactacctgatcgtgtccctggcgctggccgacctctcggtggctgtggcggtcatgcccttcgtcagcgtcaccgacctcatcgggggcaagtggatctttggacactttttctgtaatgtcttcatcgccatggacgtcatgtgctgcacggcctcgatcatgaccctgtgcgtgatcagcattgacaggtaccttgggatcacaaggcccctcacataccctgtgaggcagaatgggaaatgcatggcgaagatgattctctccgtctggcttctctccgcctccatcaccttacctccactctttggatgggctcagaatgtaaatgatgataaggtgtgcttgatcagccaggactttggctatacgatttactctaccgcagtggcattttatatccccatgtccgtcatgcttttcatgtactaccagatttacaaggctgccaggaagagtgctgccaaacacaagtttcctggcttccctcgagtggagccagacagcgtcatcgccctgaatggcatagtgaagctccagaaggaggtggaagagtgtgcaaacctttcgagactcctcaagcatgaaaggaaaaacatctccatctttaagcgagaacagaaagcagccaccaccctggggatcatcgtcggggcctttaccgtgtgctggctgccatttttcctcctctcgacagccagacccttcatctgtggcacttcctgcagctgcatcccactgtgggtggagaggacatttctgtggctaggctatgcaaactctctcattaacccttttatatatgccttcttcaaccgggacctgaggaccacctatcgcagcctgctccagtgccagtaccggaatatcaaccggaagctctcagctgcaggcatgcatgaagccctgaagcttgctgagaggccagagagacctgagtttgtgctgagggcctgcacaaggagggtgctgttgagaccagaaaagaggccaccggtatctgtgtgggtgctacaatctccagaccatcacaattggttagcagacaaaatgctgactactgtagaaaaaaaggtcatgattcatgattgaaagcagaacaatggagatgaaataaacaaggcaaaatagaggtggaaacagaaggaagtcatttgctgagtctgcagaatggaatgcagcttctgtcctttcttgggatgtctaaaacatgacaaacagggtgatctgttgtacacactatcttatgagggagatggtgacttctccttttttctgtggatcagtgctattgtgtgttctcagtttaagatagcagatcatctcagcagtaagcacaccaacagaactgagttccagaaaggaagcagtttctggtgctttgcatatgtccaaatccatgcaagtgggagaaagttccagtgcacacttcccatgcttctgagtctaggcgttgtggtgaatatgcaggaatcattcatgagacagaatgtattttgttgtatgacagaaggcttttccaagcaaactgcggtgagcgtagtgttgaatatgttgcatgtccatgttagaaaacagaatccagtcatcagctaatacaaatgatttcccagagcagtgtttgtttcaagcttctgtcaaatagtttggcttttctgcagggtctctgtgatttccccatctatgtacttttctgtgttaactcacttattatggtataactcaggaacaggtctcaggatggagagaagcatacaacatgagcaaagctttttctcgtgctctgaagggtcttgagaggggagtgggatgccttctgtgaggatttttatcgcagtgaagctcaagtggtacccaactgcgttgtaattaacatgattattggcatgtttttgactctcattttctacaaggctgcagtgggcccacccatgggctggcccataac

SEQ ID NO: 25 - protein, 471 aa, Homo sapiens
MMDVNSSGRPDLYGHLRSFLLPEVGRGLPDLSPDGGADPVAGSWAPHLLSEVTDAPTWDAPPDNASGCGEQINYGRVEKVVIGSILTLITLLTIAGNCLVVISVCFVKKLRQPSNYLIVSLADLSVAVAVMPFVSVTDLIGGKWIFGHFFCNVFIAMDVMCCTASIMTLCVISIDRYLGIWLTYPVRQNGKCMAKMILSVWLLSASITLPPLFGWAQNVNDDKVCLISQDFGYTIYSTAVAFYIPMSVMLFMYYQIYKAARKSAAKHKFPGFPRVEPDSVIALNGIVKLQKEVEECANLSRLLKHERKNISIFKREQKAATTLGIIVGAFTVCWLPFFLLSTARPFICGTSCSCIPLWVERTFLWLGYANSLINPFIYAFFNRDLRTYSLLQCQYRNINRKLSAAGMHEALKLAERPERPEFVLRACTRRVLLRPEKRPPVSVWVLQSPDHHNWLADKMLTTVEKKVMIHD

SEQ ID NO: 26 - DNA, 20334 bp, Mus musculus
agtgagcggcctgagacagcgaaccaatggagcgccgactcagcaggctgaagcccgctctgcctttgcatccggagacgcgggctgttcgcgtggtctctgctcctgccacttcccctgctgtcgccttagcaccatggaagccaccaagcaagtggttaactttgggcccgggcctgccaagctgccacactcggtaaggtggctggggtttggtcggagtgcgggcatcgggatgtggggcgtcgggatgcgggtgttgagatacagacagcggtgagcagggatgccgccgtggagagatagttgctgaggccgaaatgcgctcctgtgcacagacgcgggcgttcacttccagccggcctcctggtggcgtggcctctgcggctcccgcgtgcacaggcgagcgtaggagtgtgaatgaatgggcggtcggggcggcacgtttccttccggggagcgcaggctaagctccgggcgctgggagcatagtcctcagaactcggaaattgaaagctgccggcttctccctcttcgcctccaccgaacccacccagcccttaagcctttctcctggaaacctgcctgtctcctcagactctgaaaggctttggtctgtttggccaagttccattcacttgatcggtgtgtcatcccgtcccatcctgcacgggttcctcccgcaccccagctgtgcggaatgagatgcctctcgtggccgggagcccatggaccagctgtccaagctgctatctggtaaccgcttgccacagctcgcaggcatggccaagaattgtacaattatcttttgttgaaccctggcgatctccccgggacaccacggtctctgttggggtagaaacaggatagtgtgagagagggaaagacgcctttcttttgtagggacagcgacacaagctgagaacagggctttttctgcagccattgcagttcatcttatatgacggtctttggtagaactgtgggaccttctgggagatctcccccacccccatccctctctgttttggaaagctctgggttttttgtttgtttgtttgtttgtttgttttgttttgtttttgccaggttaggtaaggcagtgtctctcagtacaggctagcctagaatttactttgtaccgcacgctggttttgaactattcctgcctccacctcccaagagagcagtgtcttacttagggttactattgctgtgatgaaacactgtggccaaaagcaactagtggaaggaagggtttatttcactcacagttccctataacagttcattatcaaaagcaatgaggacagggacctggaggcaggagctgacgcagaggccatggaggggcgctgctttctggcctgctctccgtggctttctcagtctttatagcactcaggatcaccagcccgggggtggcaccgcccacagtgtcaagttgacaaaaatagtcagcatgtaggaattacaggcatgtgcgattaacttcaatgtagtaagccttcttgatttagtttcgaagctttcaaaattcatgtatgggtgtgtctgtgtgtgggtgtgtgtacgcgcatgggtcaagtgcctgaggaagtgacttagaggtggttgtgagctagctgatgtgggctctggagctccaactgcaactcctggaagagcagtctgtgcttgtcccagctgagccatctcttccatgacttctccggccatcatttaaaggaaggcacttggaaaaattcactgctggagtaaacctcttgtaaatcttaagctccagggtatcggaggtcttctggcttcagagggtagatgtacaaataaatgaatactaagataaattaaaaaaaagactgaaaataagttcaaagatggtttcagatagtagggggacgggatctggtagagctcctgcttgctgtttgctgaggcaggtcctgtttaatcctgttgaacgcacaaaacccaagactctgtcccaggtgcttcttttaatagggatgtgttcactgaaatttaacttgaatgtttttgatttatatatatgtgtgtgtgtgtgtgtatcatactcctacatatataaaaaactaagattctgtttttgttgcaggtgtttcttttagaatatgaatgtataaactaaaatttactcaaattgtatatatatacacacacactatatatatatatacacatacatattgagataaacatatattacacacacacatggccagtgcagtttcaacataaaatttaatgatatcttgttctctctttctctctacctctctctctttttaagctagattagcaggataggatttgtacccttgtcagtcttctacaggtttaagttacagaactcctatctacgacagttcttaaatggtatctcttcttgtttgtttgagataaggtctcattatataaccctggctgacctgttactaattatttagaccaagctaccttcaaactcagatatctgcttacttctgcttcccaagtgctgggataaaggctcctgtcagcacactgggccttaactagtgtctcgatggcatctaccaattagattctttctcacagcgagcgtctcacagtgtcttttgcacttggtgtttaattttagagcatttatttatttttctgtctttgttttgagacagggtctctttacagcactctggctgtcctagaactctcatagaccaggctggccttgaactcacagagatccatctgcgtctgtcctctgagtgctgggcctaaaggcatgcacccccacacccggcctgaacctttctttattatggatatcttttatttacccgccaggatccatttcttgtctaagctacattcaacataattgacattcttatttaggcatactgagcccccccccttgtagttataatagttttttctttttttaatttcctggtttagataaggagaacctatgtcatatgttctatttctctctccacccttccttctacttctgactccttcctttccttggtctctcctgatttcctttcttttggtgttggggattgaaccaagggtccccagtgtgcccaacacattttataccactgagctacatctctagcttccggtttccattgcactataggggaattgatactgcttatttgatttagtaagagaaatttatgtgagtaattggtttcccaattaatgtcacatcggtaagtccccatggcccttcaaaggctgccttatcagaatggaataatcgtatgcaaagtcaagatgcagcccacagctgaatgaaaacctttctttcagtctgggttgaatacattttctctttcctccacctcccccctccccccccagcttgctgcagatgaaacccagggcttcctatgtgctaagcaactgctctatatctatctatctatctatctatctatctatatatatatatatttttttttttttggtttttagagacagagtttctctgtgtagtcctggctgacctggaactcactttgtagaccaggctggcctcgaactcagaaatccgcctgcctctgcctcccgagtgctgggattaaaggcgtgcgccaccacgcccggctctatctatctatatttatcaatactatctatcatatagtatagcttcggctcctgagtttattttaattcacggcaggttcttgccattgccacctatcaatattcttagtgctcccctcccaaatgtcctgcctgtatgatttggacataacatagcctttgttcttgttggtctctaaactgagaactttatatgtttagtaagtgagctttaagagagaggtgaatgaggtttctaggaaattggtaaatttatgtttttgaaaaaatacctcgaatcaatcatgttgcgtagtttcaggctcagcttgtgtaagttgtacttgtgaggctgggggtggtggggcttggctcctcccaggcctcagccgtctctgccgtccaggcatgtgtgcagagcttgctgactgacatcttctttctcttctcccaggtattgttggagatccagaagcagctactagactacagaggactcggcatcagtgtgctcggtgaggctcactcctggattctcttactaaagagcagatcctttaagcccaggctctgctctgcatggtcttccatacagagtaataggttatagggacagggacctataggctactgtgtgagatcctgtcttagaaggaaaaaaagaaaaggcaggcatgttggcgaggggcttaatcccagttacaggtccacttaaactttaatgtcttgggtcgcatgtttgctagagtcaaagactgacaaagcctaagtgcacatgagaactttagacggagctcatcggttcataattggtttttactgagcacaagatgtgagattggcagatactatacatttgcaggatgggaccaccaagtgtatgtaatatggcttcgcattcggtgtaaagtttttattaaactttaaataaatatttataagttaaaattcataagcctccatgaagatcctgctcattaataatttatttattaaacttttgctcttgtttaggaagagaacctccaagctctagagtttacacctgtctgtctatctgtctgcctatctatctatctatctatctatcattttcttccaagttccacgggctgcactgtgtgaagggactttagggtgaactgtcttccttcctgtgttaatttttgttcctgtgtgtgtggtgtttggagctatacttaggtgtctttcttgttgcttctttgttcctttttgctttttttttttttttttttttttttatttttgatacacggtttctttacagtcctggctatcctctaactatgtagaccaggctggccttgaactcacagagaacctcctgtctgtgcctcctgagtgctgagattaaaggcctgtgctatcaagcctgacttttttttttttctaagaaaggatcttatacagtagtctaggctggcctcgcactcttgacagtgacaatccttctgcttcagcctctagatactaagtttataggagtaagccaccatgcttaattcttttatttttagacaaaaatcatgcttttagctcaggttagctatgaatttaaatcttcagcctcctgaatgctgggattagggaatgacctcggtgtgccaccactcctgcctactgtttagatctctagattggggaaagagatagagccgggaagggccgatcagttaatgtggcacttgagaaaatggctgccgtgacgacaggactgaaatgttacagtttcaccatcagtgtgagctcggtaattgtcccccacagtaagagagcgggcatgtgctgccatctgaactcagaactctccttacattatttctccataaatttcacaaccattttttatttggtattatacttgaacttttatttttttctctgttattcctttgcttccacagaaatgagtcacaggtcatcagattttgccaagattattggcaatacagagaatcttgtgagggaattgctgtaagttttaacaagtatttttaaaaattttatcttattttgtgtgtgtgtatacctgagtatatgtatgtgcgtcacatgggagtatgtcgcggtcagagtaagggttagagcccctagaactggaattagagaatgttctgaacccccaagtgggtgctgggaacggaacctaggttctctgcaagagcagtcagtgctctcagccagttgtgctctttcttaaaaggccagctcattagtgttgttctctgccgtaaacctgggtgcctactgccttatcttctgtacctcacactttgtttacaatgtccacaggaggccaaagtcatcatgattcaagcaaaggtctcggccagaccccactggccagcttggctcatcgctcatcccctgtgttggggttgaccatagttgaaatctgagggttgcgcagcagaagtgggattccctaaagagaaagcagggcatttctactctcagcagtggcaaggaaaccaataaatgattaaattggctagggcaaagtgatagtgagactttaccatatttctttatttttttttaaagatttatttatttattatatgtaagtacactgtagctgttttcagacaccccagaagagggcatcagatctcattacggttggttgtgagccactatgtggctgggatttgaactcaggacctttgtttggaagatgagtcagtgctcttaaccgctgagccatctctccagtccccttctttttcttttaaggtttattttggatgtgtgtgtatttgtatatgtgtgtgtactcacagaggccagaagctaactccggggctggagttatagacatttgtcagctgcttggatgtgggtgctgggaactgaacccaagttctctgcaagagcagactgtgtacttaaccactgagccacctccgcagcctctagaggaagagtgaaagtttgcatttagtggggcagccctcattctccatatttgacatgttagtttatgttatttatggtcactcgttttttatgcccagagctgttcccaacaactacaaggtgatctttgtacaaggaggtgggtctggccagttcagtgctgtccccttaaatctgattggcctgaaagctggaaggagtgctgactacgtggtgaccggagcttggtcagctaaggctgcggaagaagccaagaagtttggaacggtgaacattgtccaccctaaacttggaagttacacaagtaagttctgggaactgaagatgcacggtgaggtggtggctggccattgcccttactattctattgctgctcttcttccgtcagtaatgatctcagttagatgtgtggtgatggtgctctactgactactccttttgagtgatgagagccttgtttacctaaaagcccaggagcaggttggtggttttatggggagagcaagggctccagggatgctgcccctgtctaagtcactccttatctcctctagtagactgtagtctggaaattggtcccttttctaggaagatggctgcagttgctcttcagctcttcagcttcttatattcgaagttttaatgcccttgctagagcgtcccaatgataatatcacattccctgctgtgaggcagtcactgactctgcctgagtcacccttcacctctaggggtatagatttgattggccctgctggaactacgtgttcccagagtgggtaagcactgtggtcctaagaggaagcgattagacaccaacaggagtgcagggtagatggatgcttgatgacaggaaaacctaaacacccattccttttgttggttcgtttggtctttcgagacagagtctttcgagacagtctttctacctctgtcttacctggtagttttgatgtagcacaggctggccttgaactctgagtagtctttttttccttaacctttcaagtgccggattacatgtttgcaccaggacacttggcccctctgagcttcattggcatgttatttgtgcccagtaagagggtgatgggtcatccccagctgttagtggtaattgcaagagtgagtgagtgggtcggcccgtgctcttgtcaagtgctttggagttagtctttccctcaggaagctaaccagtctcctggctgacatcgtcttcgtatggaaaagggaggttttcaaatttgccctttgtgacagaaattccagacccaagcacctggaacctcaacccggacgcctcctatgtatacttctgtgcaaacgagactgtgcacggggtggagtttgacttcgtacctgacgtcaagggagcggtgctggtctgtgacatgtcctcaaacttcttatccaggccggtggatgtttccaaggtaaagaatgaaaggttggtttggggaaccagtgaacgtttctttgagctgttttgatatatgaacttggttctttaccttctgggccaccttactgggcccattttgactccttttaggcgttgcagctcagtgatgtgaagcctgttaccattgctctgcagccttcacctctgtccagctccaagaactttcagattttgtactgtaactttgtcccattaaaatttcacaccccagcctttgccaaccagtgtccggctttatgaatttgtactcaagggaccttccataaatgggatcatgatatttgtccaccagtgccttcagcatttatgttgtagcatatatatatatgtcccccatctccttttgtgcacatgtttgactacaccaaaccatgtcacttgttttgttttgttttcgagacagggtttctctgtatagcccaggctgttctggaactcactttgtagaccaggctggcctagaactcagaaatccgcctgcctctgcctcccgagtgctgggattaaaggcgtgcgccaccacacccggctgccatgtcacttataaaccatatacttctacttggtttcctgaggatttcattggggataaagaagcaggactatatcttgaacaacacaaagttctcaggaactgtctagacattggcatatttgaaagttctctttcggtcagtgtctcatccactcacattgtttgcagcagccccttcaaagcaacttctgaggctctatatggaagttcatattcattatttttgacctaaatatttttcagattgattaattttattttacacatatggatgtttggcctgcctgcatacgtgcgtaccagatgtgtgtgtgtgtgtgtgtgtgtgtgtgtgtgtgtgtggtgtggtgtgtgtggtgcgtgtgtatgtgtgtgtggtgtgtgtgtgtatgtgtgtgtgtgatgctggcagtggtcagaagagaaacacaaagtgagtcctgggatccgaacccaggtcctctgagaagcaacaagtgctctaaaccactgaaccgctctgcagcccattgatttaaaattctaaaaatttatattttaaccatttcagtgtttaatgaaaatatgtaactaaaagagttttcatttcaaattatgaaaacattaatagttgtacaaaataatattttagattaaatgatagtattttactttggttaccaaagatttggaggcttttttattatattatttttcaatgtgtgtatgaagcctaggctttacgcatgataagcatgttttgttactgaattgtatctcaatccagagagtcttatataccaggctagctttgaactcactatcaagccaagggtgaccttgaactccgggtccttctgcttgcatttcccaagagctgggatttacagttgtgcaccactgagcctggaccagaaggcctatattattttgttaaaaaaatttgtttttagagttacttctttctttttttttccccacaagaagagatttttttttattgaatggggcgaggaatggaggaagaaaagaaagagcatccttatttcttattatatgtatattagtgtatgtatatacaggtgccacatatgatctttgagtcctcagaggtcagaagagggtgttagaacccctggaactagagttacagatgtttgtgaaccactgtgtgggtgcagggaccctctgtaagagcaagagccacctctccagttctgaggggcccatttggaagcagaacaaggattgcaagagcataagtgtgtctcggggcttgacagttctcggtgtgggagacctcggggcaaagaccaggccttgggtctcggaagtgctgacttgctgttttgggtagagatttctatagtatggcatgttcctaggcagaaatgggtcacttcattaaaatggttgtttaggggagagctagcccttggcatgcatggcttagggatgattacagctgcttctaagatagccaacgtttctttcttcttttttaaaagtttggtgtgattttcgctggtgctcagaagaatgttggctctgccggggtgacggtggtgattgtccgggatgacctgctggggttctcgctcagagagtgcccatcagtccttgactacaaagtgcaggctgggaacaactctttgtataacacacctccgtgcttcaggtaactgtgggactctagtcttctgtccaagcagaagttaaggagagcacgcttcattagctggtgacccaagcaccccagagacactcaacgatctttgtccagctctcctctaggcgctgtttggtcagtttttcttgttgcccttttttggtaaaggtgacaatcttggtctttgcttgattttgatgttgaccgttaacccacaagctttctctctatagacaaagttccatggactgtgtctcggacaaacagggtcgctttccagaaggaagagggtcaggctagggcaagtgtgcagggttcttttcttccccgctggagaaaatcattcccccgacacacatacacacacacacacacacacacacacacacacacacacacaagaaagggaagagtttggagttaaaatccaactgtcccttcccccaacccctacccactctttcctttgagtagagtgttctggggttaactctcccggtcattccttactcttggactttgaccgaagatttttttaagatgaatgtcaaggtatcattggggaccacctgttggattcctagaagagcagctgaggtaccaggatgtgtgggcaggatgttagaaggtgggaccacatccctgcctgagagtcttccaggaggagtctttagaagagagaaggctgagtcccacgtgacgacatgacggtgctcacctgcaatctcaggactaggggtggagtcaggaagattgagactgctctatatagtgaaattcttgtctccaaaactaaacaatgtgagaaggtaggaccaggcggaatgaaggctgccctggaaatgtgtccagaggccaccggaggagccagggtgagcagtgtatgtacacccttgggcaccttttctgggagttttaaagagatgtgataggcatgtttacacgcggtgtgttaatgtgacactgccttgtgaacagtgagagaacaggccagatgtttgatgggaagtggaaaaggctggacacctagaaagtccacatgccagcccctgtgctaagccttggaaggctttgatcttcttcctcagactgcaggggtgtctcagagcaagtcagggcagtgagtacgtagactgaaaccgagcagatgcagaacaggtgaaaggtaggacttggtggctatcccctcatctcccgcccagttcctattttttgttgataagacatgacttctatgtgacttaagtactcaaagttcactaccatgctttaacattcaaggatagaaaatggctcacgaagagccatcttctgggggtgatgacagtgtgttcagggcgggggaggtgccctcaaccctctactccacagtaggcagataaggatgtgagcatgtcaaggtggtgttctttgttttctttctttggtcagagtccaaagattgtgggttctgggaactgtttgactcttgtggataaactgggccatagccttatgcaggaactcggctggaataaaggactctgatgactttctttttaacccattggtagaacacactcaaccctgttagagggcggagaagatcctaaacaaaccttccaacttcataaaacacttcttatgcatattgacatgttaagcaaagatcatttttagctctaatgtgaggggaaaaagtcttttacccaattatctttttcagttggtgaaaataaagatgcggtgacaatgcctgtattcccggggcttaggagacagaagaatcaggagttcaaggtcatgtttgactgtttagcaaatgcagggcaacacatggcctgtgcagacagaggctcttgggaggctcggagcagctggaacctcaggtgtaggggagttgacctcagggccagctatatgaaggccttcataagcttctgagagggttatgacatctagatcccaccccaagcttatctgcagcctggagacttctggtgacctttcctaaactctgacacacagggtataattcatattgtttaaaaatatatataaatagcacccacacttagcaaaagttaccagggaaacactgcctgcctatctagtcacccctctttaaccatcgaagactctttccaggacccccaaggggtccaaaatcctttattattattattttttaaagatgtatttattttatgtatgtgagtgcactgttgtcttcagacacaccagtagaaggcatcagatcccagtacagatggttgtgagccaccatgtggttgctgggaattgaactcaggacctctggaagagcagccggtgctcttaaccactgagccatctctcaagcccagagtccaaaattcttaggtggtcaaatctctttttaaaaaatagcctagtatatagctatgcacatcttcatgctttaagtcatctctagattatttataatacctaatacaatataaatgctctaagtaatttatatactgtattgggaaaggagtaaagacaaggaaaagatttgtttgtattcactctagacgctgattttgaaatattttttttctgtaaaaggttggctgaacccctggttaccaaatttgggagtttgaagaggtcagatgtatactgtcatatatttaattgtgtcagtgaactgtgacacccgtaacacaggtttaactgtgaaccatgctgcttagacttgtgtgactccgttttttaacccagcagtgtaccgtgggcattctcatgtgttaggttaaatgcctgccctttccaccattgttttcatagctggatgctattgcaggggacatttcaggcatgcttaggtggtaagcctacttggtgtgtttgggggtagaccgatttagaagtagaggcatcagtcaattaaaagtgtgcaccagtggtggaaagaactgggctcaagttgtaaatccacatagcattataaggctcctgtagtttcaagagttttggctttagaggatagaggtttgagttagtgatgaagtggaatctagaagaccttgtggtaagcattcacaggggcccaatggcagtgcttagccaggggctgggtggggaagcaggcaggagcttgctccgagcagcctgcttccttctgatccagctgctgcttgctgaggcattggagacccaggctgaggggcctggctgcaggcagtctgtagaaatgtgttggctttctgctgctttcgcctgctcagatcctaagaaggcagccacagggtatgggcagccagcctgaacatggcggggctccagcgttggtcctgaggtctagctgagacaggcccttgctggtttggattttcttagagaatctacagttttgaaacataggcataagagagcatcaggtaaaagtgactgtggtttcctaaaagtgttcgtcatgattctccttggctctggtagtctgggatgtttctgtggttcataggcgagtaggctgtagatggtgggacgagcagtttgtggttatgtacttcttgtcaagttctctgtgtctggtgttgctttctgttgccttctgggaagaaactctgtggttcttggcctacctggttgagccagtgaatggccaatcggtccatgtcagaggtttctgagggatagtagccctttggctgtcagagatctgtgagctttggctgctctcccaggccctgtgctgagcatacggtttgtgggagataagaagtatgaatacttggctcagtactggatagtcctgtcttgtggctggacctcctagaaccaggaacacaaatcttctaccatgaccaggaagcagcctagctggggcatccctatcaccatttttgctcagccttcccatcagaccttggcagctcccatagtttacctttatcccacacccggacacagctacgctctagagagaatggagccgatgcctccggactccaagctcaaggaggacaggagacctgcttctgcttcttgggctttcagtgaggggtatatgggatctttctaaaggcagttagaagatttttggccaactacccgtcattctcaaatcccatttaatttcagctgtgcgtggatacctaacagctaccatttgggtaggctatgcttaccaggccctgtgccaagcatgggttttgtgggagataagaagtcttaacacttggctcagaaagagatggacctgtgttgtgttgtggctgggcctcagaaacaggaacacaaatcttacactatctattccctactatcctgggtttttttgtggggggggggttcattttgagaacagtcttgttatgtagctcaggctggccttggactctgtagtccaggctgagccatccttctgcctcagtctcccactcactaaggttacaggtcggttgctctccatttctgatccctgcttctctagctagtatgttggcttcgctgtggctagaaacgagatctgctggggctcatcttctacccggaaggtgctagttcagtcctggctttcccaactcccagcttagaagatgccagggaagctgctgattggtgtagttaggtctcgtgcccacctcttacggccaggggagcaaatcttgcagctcaatctgcatgttggatgtgggggagctgaaaagaacaggataggcccaactaccaggcatccgccacgggtagtgatgactccgtgccctcagaggtaaagacaagctgacatttacatggtgactagtcctgtgtggtccatcactgcccatctctgcctggtgggaggcactaacttgggactctgggatagaaaagaacagtgtgtgcctccagccctctagcattagagtctaagacatagacatggtcacagaagtttaaaataaagaaacggaatgataaaacaaaagcagggcggaccccacaagtgtggatcatgcctacgagcaagggactgtagggattcaggaggtgtggagagctggcttagggtgggttggggagacagtctagagcagtggttctcaaccttcctactaatgccaccctttgtttcagttcctcatgttgtgctgacccccaaccataaagttattttcattgctacttcaaaattgtaatgtaaatatctgtgttttctgacggttttaggcaaccctgtttagagtcattgagtcagggttgtctaaagagatggggggggtgtggtccccctttgcagagggtctggcgctctgggttacctctttagaataccatgtgaacatcagctgcattggcttagttaacttggctcactcttcgagtggaatgcttttatccatttgtaacgatgctgaaagtgtctgcgtgactcccagtaccagtttgcttatatgtccttttggcttttgggaggtgaactaactggtgttatgttttatccctgcttcagcatctacgtcatgggcatggtcctggaatggatcaagaacaacggcggggccgcagccatggagaagctcagctccatcaaatcccaaatgatttatgagatcattgataattctcaaggattttatgtgtaagtcaatgcgttgtatgtcctgtgaagtggaaactctttcttgaaactttcctttcccctggacgctggtgtactgctgagtgatggtcccagggctcgtgagctgagggtggagggaggaaagttctttgctcttgtgcctcacgctgggaaacaccagtcttttgtgtcaagtccccaaaaactctgacctggggtagggtgcattatttactgtcagggatagaacccctctccactccttcttcccttgtgacactggaaactgttgcaggaggctatcagctttgcctaaggtttcctattggtccctcattgtaaatccctgctcctgataccacctccccatgtgggcttgaacacaggcacacatgggcattttgcctgtataggtttgaggtcaacctccttggcagtcatcactttccctcacttccttgtttgaagcagggtctctttgcttttcatagtgacatttgccgggctaacagtcccgtgagctgccacggatcctcctcccattttaccttagaagccctgggattgcagatgtgttctgcccatcaggcattatgtatgctctgggaatttgaacagtctgctctccttccccttctatcaaagttcactggctccttgcttctaggacaggtgtccccatcgctcacctgcagtctgaatgagattggcagggttgaagttaaatactttcatgacaaagatgggtggtcatgtgttgatcactggctgcatttgtgaggtctggacaacacatggatcttgtagatgtttcctggggctgctgtaataaagcatccatgaacttagcatctttaaaaaaaaatttattttatgtatgtgagtacaccgtcgctgtattcaggcacatgcagagcaagcagctggctgaccgagccatctccagcccccatggctgtttttctaaaactcagatctactactgtgcaaactcactacccatcatcattactgacccagtcaaattgctgaaagagggccagcaggctctccatggaccagggtcatgtgcctccagacattcctgccaggagcccagcatgctaaccgagagcaaactaaccagagcttgggcagcctcctcctccacagtcctcccgttccctcttcctcctctgctctccattccctacttccacatagtcccctcttcactgctcagcaaggttgccattttggaattctgtagtcctctccagctaaccaccctcctggcctcaaagtctaattccatctttcaccgggaggagaacgacggagtcccttcttcgtcttgtatggaggacatgaggcagtggctgacatgtttgtgattcagttttccgttctgagcttttacgacatgattgtcccctattatttcctcttcatgcagggtgggtaatcagggggcgtgagctgcaagtccagatctttgattctgagtcttcagccacgggacgggccctgcttgtctgcagccttgcagaaagagctgcagacttgtgctgcatggttgacgtgtgctcgtagctctgtaaacgatccactcaattgtcacagatcctgtgaaacagagacagtgctgctgcttatattcaagtgaagggactgaggttgacagaaatgagatgcaggttatacaagtgaccgctagcctactgctgtgtgagtgaggcttctcgccatgggtaaattataacattctgggcgagagtctgtttgttttgctttcatttattttattttttatttatatgtgtacactgcagctgtcttcagacacacactggaagagggcatcggattccattacagatggttgtgagccaccatgtggttgctgggaattgaactcagggtctctggcagagcagtcaatgctcttaaccactgagccatctctccagcccttgcttttcgtttcttttccttctttttaatcatccagttgtttattttattttattacttagcccccgctggccttaaaatcaccacgtggctctggatgaccctgaacactgatgctcttgtatccgcttcctggttgctccaggttacaggctcgtaccatcagaaccctgcactggttaagcactctgtcagctgaatgccagccccagcccttagtactgtttgagaacctatatattcgcttatgacactgtacctcttagaaacacagatgagtaatagacacgcttttcagatgcccagtggagcgccagaatagaagcaggatgaacatcccatttcgcattggcaacgccaaaggagacgaagctttggaaaagcggtttcttgacaaggcggtagaactcaacatgatctccttgaaggggcacaggtaagcacaccttgtccccaggcctgtcagaggcagaaagaataaaacccaggaccttacacggcctggggtagtggttatagacttgctggagaataagccgcttctggctgggttgcggtgcattttgcacgggggtttcatcaacactgaaggtgcccctggtagggctgcctgcttcactctggtgttaacagaccatcactgggctcagttgaacatcagatactgtgaccaggagaccagcagcagagtgctctatgtggttagaactgttgcatagtgtagtgagtggcatggccccaaacccagtcaccctcctcctctgagtccccttcctcctatttggtttcttctttatcaaaggtgaatagtttgggtgtgatcaaagtccagtgtatgcatctctggaaatgccacagtgaaacccattaatttgtacaaataacaagccaatgaatgagactaaaaactagattgaggtaattcagtgggtagatgatcttcaccgtacaagggatttcctaatgactgaagcttcatgctgcctgctggggatgctttcgggtgcaaacttgagcacccgggctgggagctgccgctctccggaggggtagctagtgaagggtgtgttgtgctcaagcagacgccttttgcattgcacgtttttctatgttgttgaggttcaaacctggagccctacgtatgtgagggctttaacccagatttgctctcttccattttcttggtctcactggacgggcctctgttgttctaggtcagtgggaggcattcgtgcctctctgtataacgctgtcacaaccgaagacgttgagaagctggcggccttcatgaagaatttcttggagatgcatcagctgtgaacatgaccagccacgctctgcctgtgagcagcacgcagcgtcgtttagagtaacttgggattgactacagaaacttaacagacatggatttttttttcccaaatacatgcttattacagattcctttctcaaagaataacgactaaacatcagggcactgcagagctgaggaaactcccagctaacagccaccttcattctcatgtgacctggaagcattttgaaagctttctttcctgttgctcttctaaatgaattcagcctgtcagccatctttgctgcccccttctctaggtggactgccttgggctttgccctgctggttccaactggttattattaggaggttggaggccctgtgggctggattgacagcagtgagtttgctgggttctgcagcagttggttcaagtcaacagcgactcacgagcgttttggatctgtgtactgcaattcccataaagagataggtgtgttatgctgtgtttatgtagtgggtattgttttaaacaccgtacggtttatgcctatgcctttatatttctaatgaaacagttttgttcagcccatgactttgtgcatgactgtcgtccgttctagtcacctgtgctctccatctactgccttttaaagctgcgtcatgagaaggatctacacgttccaccatgactctcgtttcttgccacaagtagaagaaatggttgattctttgcttttcggttaggccgttaaacaaaactcagtcacacccctgccttccaccctcaaactgtgatcacgtggctgttcttgtagtttaaccagggcaacactatatattccaggtctatacattgctgaggtctttttctggttgttcatgtatcagtgttttcaatcgactgcatggaaaacattaaagtcctaagtcatctaagccattcattgcctgtgaattattctgcttgcttttttagtcaggtgctgcttttaaacattctgatggggagcctagggtttaaaattagcctgtgatagggtagtgtagtctagacaaaggtgtcaggcttcgttcttgtgcaactcagtgtggttgcttgccttttactttggaacaaacactgtcagcagagtcccttccagcacagctcccagggaagagttttgtgaactctgtcccagttagcccagaaaaaaaaggcagcagaacagctttgcgctcatcctgttgcattcgattgcacaaggggaagacactgattgcttggtttctccggtcaggttccaccagctcattggtgaagagttgaaataagacccaacattgcaggatg

SEQ ID NO: 27 - DNA, 2593 bp, Mus musculus
  misc_feature (1)...(2593): n = A,T,C or G
agtgagcggcctgagacagcgaaccaatggagcgccgactcagcaggctgaagcccgctctgcctttgcatccggagacgcgggctgttcgcgtggtctctgctcctgccacttcccctgctgtcgccttagcaccatggaagccaccaagcaagtggttaactttgggcccgggcctgccaagctgccacactcggtattgttggagatccagaagcagctactagactacagaggactcggcatcagtgtgctcgaaatgagtcacaggtcatcagattttgccaagattattggcaatacagagaatcttgtgagggaattgctagctgttcccaacaactacaaggtgatctttgtacaaggaggtgggtctggccagttcagtgctgtccccttaaatctgattggcctgaaagctggaaggagtgctgactacgtggtgaccggagcttggtcagctaaggctgcggaagaagccaagaagtttggaacggtgaacattgtccaccctaaacttggaagttacacaaggaggttttcaaatttgccctttgtgacagaaattccagacccaagcacctggaacctcaacccggacgcctcctatgtatacttctgtgcaaacgagactgtgcacggggtggagtttgacttcgtacctgacgtcaagggagcggtgctggtctgtgacatgtcctcaaacttcttatccaggccggtggatgtttccaagtttggtgtgattttcgctggtgctcagaagaatgttggctctgccggggtgacggtggtgattgtccgggatgacctgctggggttctcgctcagagagtgcccatcagtccttgactacaaagtgcaggctgggaacaactctttgtataacacacctccgtgcttcagcatctacgtcatgggcatggtcctggaatggatcaagaacaacggcggggccgcagccatggagaagctcagctccatcaaatcccaaatgatttatgagatcattgataattctcaaggattttatgtatgcccagtggagcgccagaatagaagcaggatgaacatcccatttcgcattggcaacgccaaaggagacgaagctttggaaaagcggtttcttgacaaggcggtagaactcaacatgatctccttgaaggggcacaggtcagtgggaggcattcgtgcctctctgtataacgctgtcacaaccgaagacgttgagaagctggcggccttcatgaagaatttcttggagatgcatcagctgtgaacatgaccagccacgctctgcctgtgagcagcacgcagcgtcgtttagagtaacttgggattgactacagaaacttaacagacatggatttttttttcccaaatacatgcttattacagattcctttctcaaagaataacgactaaacatcagggcactgcagagctgaggaaactcccagctaacagccaccttcattctcatgtgacctggaagcattttgaaagctttctttcctgttgctcttctaaatgaattcagcctgtcagccatctttgctgcccccttctctaggtggactgccttgggctttgccctgctggttccaactggttattattaggaggttggaggccctgtgggctggattgacagcagtgagtttgctgggttctgcagcagttggttcaagtcaacagcgactcacgagcgttttggatctgtgtactgcaattcccataaagagataggtgtgttatgctgtgtttatgtagtgggtattgttttaaacaccgtacggtttatgcctatgcctttatatttctaatgaaacagttttgttcagcccatgactttgtgcatgactgtcgtccgttctagtcacctgtgctctccatctactgccttttaaagctgcgtcatgagaaggatctacacgttccaccatgactctcgtttcttgccacaagtagaagaaatggttgattctttgcttttcggttaggccgttaaacaaaactcagtcacacccctgccttccaccctcaaactgtgatcacgtggctgttcttgtagtttaaccagggcaacactatatattccaggtctatacattgctgaggtctttttctggttgttcatgtatcagtgttttcaatcgactgcatggaaaacattaaagtcctaagtcatctaagccattcattgcctgtgaattattctgcttgcttttttagtcaggtgctgcttttaaacattctgatggggagcctagggtttaaaattagcctgtgatagggtagtgtagtctagacaaaggtgtcaggcttcgttcttgtgcaactcagtgtggttgcttgccttttactttggaacaaacactgtcagcagagtcccttccagcacagctcccagggaagagttttgtgaactctgtcccagttagcccagaaaaaaaaggcagcagaacagctttgcgctcatcctgttgcattcgattgcacaaggggaagacactgattgcttggtttctccggtcaggttccaccagctcattggtgaagagttgaaataagacccaacattgcaggatgn

SEQ ID NO: 28 - protein, 425 aa, Mus musculus
VSGLRQRTNGAPTQQAEARSAFASGDAGCSRGLCSCHFPCCRLSTMEATKQVVNFGPGPAKLPHSVLLEIQKQLLDYRGLGISVLEMSHRSSDFAKIIGNTENLVRELLAVPNNYKVIFVQGGGSGQFSAVPLNLIGLKAGRSADYVVTGAWSAKAAEEAKKFGTVNIVHPKLGSYTRRFSNLPFVTEIPDPSTWNLNPDASYVYFCANETVHGVEFDFVPDVKGAVLVCDMSSNFLSRPVDVSKFGVIFAGAQKNVGSAGVTVVIVRDDLLGFSLRECPSVLDYKVQAGNNSLYNTPPCFSIYVMGMVLEWIKNNGGAAAMEKLSSIKSQMIYEIIDNSQGFYVCPVERQNRSRMNIPFRIGNAKGDEALEKRFLDKAVELNMISLKGHRSVGGIRASLYNAVTTEDVEKLAAFMKNFLEMHQL

SEQ ID NO: 29 - DNA, 46775 bp, Mus musculus
  misc_feature (1)...(46775): n = A,T,C or G
tcacagttgtcactaaagccttgtcctggagtcatgttttctgtttaaaggttcccaaatggctccatttgtttaaccaatatttctaaatccccagaaatcctttgcagactcaggcagggtttcccattttcaaagcatagctgaaagttgaactggcaggagacgagcatgtctttaggccatggcatctttgctctttctgtctggttccatctttaccacaggcgaatgaagaaacctaaggacattttgtcttgtttcagtttgttctcttgattgaggaatctcctcgacccatgtggcaccttcattttaatgtttttaggaaaagaaatgccaagttcatattttgttttgttttgctttgtctataaaatcttcagaaaagcacgggttgttggtttttttttttttctctgtgttttgtcatccagagacactcagatggggacatcaagaagtctctgggatataagcgaagagctatgaacatgtcaccatctgtccatttaccatatgatatgaggttctctgctcttgtgtctttccttgggcatttcaggaagttttttaattctaccaatgtcctgttggcttggtataatgacaagaactcatggggcactgcctctgcctgtcaggagcccacaccttatcccatcaaaactacatgctgggtaggcacccagaggacatcatggtccgtacttcctgagctagaaaataaggaataatttattcctttatagattccagtatagatttaaaaaaattaataacagaggtgattaggtatatatgtgtaggtatgttttagttattgtttttctccaagcagtttattaaagtgtgcaggctgacctccgtagatcattggcctttccttccacactagaatttgtgagttgtgccagccagaagaggaatggcagggttccaaaaaaaaaaaaaaaaaaaaaaagagtccttgctcattggttgatagagggggagggtgctgcagtagaaagtctgaattcagggttctggagtgtgaggttgccttctcttccccattcccattcacacccacctcacagaccttcacagactctgcagctcattcattcaccccaatggccagcaaagccagtttgtaaccgagtattctcaacatcagatatcatgtcttggaggaagttacctaaactctgaagaattatcatgtctgcaaatttcaaaatgaaccataaaagagtaagtaagcccttgaaatctggcaactttatccaggtgtctgacgttttgctgctatggtctcaacagtttttgttgcagacttcctgctggtatagtagaaagcttcagcagtggccttactggttgtgtgtctgggctgccttctgacactccaaattattacaattcttagtaaatagctggtgcttaataatttttattttttaattttaaagggataaagtagcttaaaaatagtatgattctataaccaaggtataaacacaaagttatatatacgaaaaggtaatgtaactggtggtatatttaggtttgtaactggttagtttacttaataaaacaagatcatgtaagtaaacaatttaattaccaaacaggtcattcctacttcagtaagaagtgaatagccaggattaaatagtggttaaataatagtagtcttatcacaattaatttagattcctctctgaagtttaaattttgtttaatattatttatttgatataacacactaatttttacagcagcttaattgaaatataattattatacaaatgtttgatattagatgtgtttcttttgctgagtttggacatatataaatcacctgtctcaggtttttagccataaactgtattcaaatctacaactaaacacactttaaaatatttcttagcctggagaaacatctcagaggttcaggtcctggattctgtccccagcatccacatgtgagcttacaactgtctgtaactccagttccaggtcatctgacactctcttcaggcctgtgtgttgcgggaaatattaaaaaacgaccggctcgccccagctgcctggttggccatgcactggcaggcaatggccgacctgttttatttcgtggagactctctggccttgagctcccaaaacattccacccagctcgctaagtttctactggctggtcgttaccacgccagccccacgcttcaactctccctccccgccccccctccccacgacctttgtggtacacatcaggtgcagacccactctttgctactctttgaacccagatgagccaccacatgaaggaaaccgccaacacaaactaagttcaggaacaatggtaacttaactctggacgcaacaactgaaacctaatcttgtaagccttattataatccgattcctccagtggtgaatccttgtggatcctccatgataatgggaaactctagcagttacatctcaccctgatgttgtccccattccaaaaaggaactatctcctgcctttttccttccgccctccaacccagaagtccctcctacttgcccagtgattggctcctttattcattaggggattggttcacaagaactgcaccaggcccgtccacagcacacagacaccaggcatatacatggtacacttacagacagacagacaaaacactcatacacaaaaaataaaaataaatatatctctaaaaataaaatatttatttttgagaaatttatatatgtaaacaatgaagtatgaccatatctacccctcacctctccctccaactcctcccatattaccccaacataccccctcccaactcataaattttatttgtgtgtatgtgtacataagtatacatgcatgtgtgtgtgtgtgtgtgtgtgtgtgtaaggtgcacatctgtgcacatgtggaagccagcagggagtagtggattcctgggagccacagttatgggtgtttgctggatgcctgccttgttagaggatgctgggatctgaattctaggtctcattattatacagcaagtaccttccactgctgagacctctctccagccctctattgggtaaaccagaagtactactgtatttcaggcgcatgaattcaaaggcagacaggtgtgtcaggaaacaactgcttgtgacctacgtttgggcatattagccagtgtttcctagcactgtgcttgcctgaacactgaaactctgagatgcttcagactctgtctctcagcagctgagctacaatgtcttagggagggccctaggaatctgttattttccacaaggagaaataagctaaggtgaataaacgaactgtcaaatggggtcaaacaaacccctgtgaggttagaagaggccatcgtgcagtgtgtctgggggtaaagggcaagtagctgaaacttggctgtgatgtgggagacacaatgagtgggggaagaggaggatagtccaagcaaggagaactctggctaaggttccaaaaggaatatcttgttctagaaagaagaatggggttcgtgtgactgtcaatagaaggggctagcatggtgccatatacccataatcccatcactgggaaactgaagcaggatcaggcccagtctgaggtaagcctaggttgcttagacaacaaacaaatggggaaggccaaaggagagaggctgaaagctttggcttatgtctcaacatgaagtctttgggcattgctctgaaagccacgtggtccattgtagaatttgaagaaagggaaatctcttaaattgccaataagtggactagagagagagagagagagagagagagagacaaaatccagtttgaaaggtgtcaggaatggctggctaacaggagcaggatgacttgagaataattggcccactttggtgataagagttagagataagctggtagcttttaaaaaggaaagttgagtgtgtcaggatgactcctcgatgataagcagccgtttgagaacccgatcgagagactcgaagacaagaggatgaattccatcatcattgtgctgtttccgtggctggagagagccacaaatactaggcatttaggtatctaaagatacagatttgggttttctagcaccctggtggtaggcaaagtctggggaacatgtgagatcactgagtgcccactggaagttctgcggaaaccaggacaaagagatccctgctatagaagaggttgggtgtcttatcaacaacagaaatcaaatcagatctgcactaaggagccctttctgggatccggaaacttggactccacaggcaggattaggtagtgacaggtaagagaaaggtggaagtgacagcaggtaggtgccccacaggtctgacctttaacacagaggccttgattagggaacaccctgcatttgaactaccagaactggaggtagccttttaagcattagtgaaagcctctcaaagcctagcctgaggaaatgtaacatggatgcagatgggatccgtgtgctgtgaagatagaaactgagttatgtccctacccatccctccttaaggaaaatcatgtataatctgagtactgggaacaaccttgtggtttctgctgggtcgggccactgctactgatttgtgtacggaatttgctattggactagactgctagtatcctgacgacgaagaatagaatcaccccaaggaactactgctaaacaggtccacagcccccttttttctattaactgtcttattcctctacctgggtccggtgcctagaaggaaggttgaaacacttaagaaccctaagtaaagaactctttgaaaaaaatctaagcctacatcccacaaatatcagagactgggagacgataaattctattgcctcagtggttctcacccttctaattgcagtttagtacagttcctcatgttgtgctgacccccaaccataaaattattttcgttgctacttcatgactttaaatttgctactgttatgaatcatcatggggtagttggcccagacggttggggatcacggcaaggacaggcattcctgacagaatgagcatgggagatgagatgtttgttgctcagttcagtaagaccaacaggatcacgtgcacactacagttaaaagtgaagttgattcagcgggggaccttgagacttaatgtacagctttagctttagtgtcccagggtgccaaactggttccttcctgcagaactctgcacaaaaggccagactgggtagtcccccagctagggtcagtgtggcagttccatagtcccgcctcttccggctgctgtccagtatgtctccggagtacagacttctcccggacatctctaacggcacacacactccagagaggagggaagcaaccgtatcttcgtctgcaggattttcccgtcgtggacacgtggtttttcagagcttgggggacaaaaaagaaataccgtaaaaagccacgcgcaaggttttcagatcttacgttttaaagatgctccacttaagacacagttgtgttgtcacttttgttaaacctaaagtgttcaaattatcatccatcctatgtcagcgtctgctttcttattggacttccaaaagttccatcatctccactgtcagagtatttcgtctttaaatcaacatcttgctcttggcgtaatgattcactgaagcccctgatgataggaactggtaagaaggattcctctggtcttctgacagaaattataatttgaatccaccctaaaacttcccattcgatcacaatttttgcctaataaattctagatttggaccatttctatattgtgcaaacacttttttggggcaatggttttaatttgatttttaagtaagctgtcagctctcctgcctcagtggtcagcattggtattttgtccctggacacctaatgtagctttgtttgacccaactcaaaagtattttgacatgcttccgggaatatgctaagcatgataaatagtgctgtctctgcagtgttccctgaaggtccagttggcaaatgtctgttctaaggctgtggctctataagaaggtggaagatgtgggttggaagcagttagatcattcagaggtgtgactaaggaggtcctgggatcttggtcccttctctctgcttcccgaacatcataaagtgaacaaacctacttgttctgctcttttatcgatatggtctgatgccacaaccacaaattactatggaggacaaaccctaaaattgcgtgcccaagtaaatcctgataagacacatttcgggaatgtatcacacaccagaaagctgagagacataatgagtgaatacactttattgtgaaaactgtacccatgagctcagattgaacatggccctttgtcaacttcctttatgtttgggctctttattcacgatcatttagaaccatattttctcctatataaaactccttatacacacatgcactgttttaaaattagtgacttgacgggtgttatagctcacagatttaaatcccagaactcagaaggcagaggcaggcagatctctttgagtttgaggacagcctggtctaccaagcgagttccaggacagccagtgctacacagagaaactgtctcgaaaacaaacaaaaaaaaaaacaaaacttagtgactcttcttcacttaaaacttctctgtcccccagtaactaactacaagattggagcggactgttgagtatccagtgtgtggtaactataccaaggtgggctttgtgctcagctgctaccaaacactactacatagttagcatgcattgagtgaagtccccaagggtagctacagcagacaaagactctgaaggtaaaggtgactagcttactaaggagaatttgtaaagcgaggcttccatctgtggtagctgttcagaagctgctaggcttttattagagaaattctcttttctcttgaggaagcaattgaagattacacactcaaggttaaatgcttggtagcctccctgctcctcgccatgcttcttagtgggactcagttcagggaacgggctcctaagacgtcaggtttatcagctgtgggtttgcttagcgattgctttgggtcggctgttgttcttttggttgtaatttacctcagaacgtgctttgccctgcatatcagcaatccctgaaaacaccatattttctggttacaaaatatctatatttttaaaaaaaaaaaatattacttccaaatttagtgctgaaaactcagaatatagaaataagagggaagacaattgccaaccttcccaagcctcaagataaacagttcattcctaccagcatttccctcttgatttcccagacttgttgttctctgtagccttatacatatgtttaaaaagtgaatgtagagccaggcgtggtggcgcacacctttgatcccagcactcgggaggcagaggcaggtggatttctgagttcgaggccagcctggtctacagagtgagttccaggacagccagggctatacagagaaaccctgtctcgaaaagccaaaaaaaaaaaaaaaaatgtgagattaaaactaactttctctgcaacctgtttcccatttgagcctatggcaggatgcagtttcaggtgggaatgcactgacattgtcatccagaggcgctgtcatcgcgttaattcacaagcatatctgtggttcctaacttcaagacttaaataacgttgctataaatagttttgggtaagaatcgcgattataactgtagagattctttaaagccagggtacagcagagaaaagtcagagggacgtgtctatggtctcaggaaatttcttgtagttttacttcctcccatggaccagcaagggaacagcaaacacgtggtgaaacacctgtgcgggtcaaggtcacaagcccgtgggtgttttccagggatgctgtggctttgtttgtactgtgcagggtgagctggggtcaaaggagaactcggatgcactcactgtttttacatgttaggaaacttagcgcgctgcactgtttctggatgtctcattccaggggcgccctcccttttgtgagacacttgtgacgctaagcttggctctgggactgccccacccccgccgtaaacacgttcaagtctctccctcaggtttattttcttctgatcacacaatgtcaaggctgaggctctctgccatgacccagggctcctcaccctgagttcagaagtttctcttctctcccttttctgcaccaccaatgggaggaaggggagtgtccgtggagggacactgacgcataggttgtgtggtgtgacctgcattctgaagagctcatgaagttgaccctgggcaaaggcctcccctcctattctggtaacaaagtgccactccaagagcacccaaagaagggcagtacatcgagcaaaacgaggtgactttaaactgggtaaactgggatgggtcagcttggagtgcttccttgggtaagcttctgtcattagacctgcaagagcagtgacaccctggtcgtctgtgtggaattcatgattccgtgtaaggtgtcgtcctatctcctgtctgatgtgatcaagagcccttctgccccagacctgtcccagagagaacccacaccccctagaatctcctaaatctgcatggctttagactatcatcttctccccgtgattgtcaccgaatctaacagccaaccccatgtctgaggttttctctgttactttatttaaataatgatcttagttaaatatttcatcaaccacaggagggaagcatcttgttattcaggaaagtggatagaagttcagggtagttaataactcgctgtgggtcacagcccaaggagactctgaagtggcttccagtccaggtttgctttctagttccaacatttttgcttgttgaagggaaactttcttggcagggactttttttgaaagagttttctttaaacagcagctcccttcgtgtgtgtgtgtgtgtgtgtgtgtgtgtgtgtgtgtgtgtgtgtgtgtggtgtgttttacaaaactgtagagaggatctttttccagccaaagattttctttccaaagctcggaacactacatgctcttcatagaattgcaaagtttccagtgtggaaggagactttgtagccaccctacccctctgcagttcaaatatcatcaaaatatctactctattttatttatttgcctttgtaaaacatcaagattgattttgaagtaagcaaaatgttttattgaaccaaaagaactcagtacccggtcactggaaagtatatttgcttaactttgctatagtgaaaaaaaaaatgttcaaaagtcatgattaaaccacagctataagagctgagagatggctctgcggttaagagtactggctgctcttgcagagtctctgggttcagttcccaacacctacataaatgaaagggctcacaacctttaatttcagttccagggaatctagcaccttcttctggtcttccaggaaagtacatgtatgtggtgctaatacaggcaagtatgcacacatgtacataaaggagaatgtctttaaatctcctttttaaaagccaggtatgtgatggtggcacatgtctgtaatcccagctacttgggaggggaataacaagctctaagctatgtcggactgcacagcaagcttcaaagccactttcaaaggggctggcaatatcagcggaattgaagggtacacttacccagcatgtgtgatgcccttggttcaagctctaccactgttagttaaataaatgaacaaacagagtaaatgagtaactatctggctttagatgagaagcctctgaagatggaatcagtggtgtgtcagaatacctaaataagattaacagaatgtgggctggagagatggctcagcagttaagagcaccgactgctcttccaaaggtcgtgagttcaaatcccagcaaccacatgatggctcacaaccatccgtagtgagatttgataccctcttctggggtgtctggggacagctacagtgtacttacatataataaataaataaataaataaataaaagattaacagaacgtgagctgatgctggatttctgcccatgtgctgagaaaaaaatagccagaaaaagacagaatgaacgttggggggcttattacccagatggccaggacactgtagtctaatgtcctgtggttagaagcacattagcatccaggaaggggttcgtctgtctgaaatcttacatggttttcgtttctttgccttttaaaacatgcagctgataaatttcacctatggtgaaatgcacaccttaagcgtgccttcagtgaggaaaacatgaagacttaccaagccgttctcagcacaggggcactgcagtcacccagggcggctgctgttctaacgtgactggtttgttttccccattctgtgacttcctactaatggaatcacacagacatcattttctataagacttcctggggttggcataaggtcagtcattccattcacgttgaacatatcagccatccattcattttgggatctgagtagtgttccactttgtaacccttctgctatttgacctgggttttcatcaggggtatgtttattattattattattattattattattattattattattattgatgacaatcattcccagtgtgtgcttctctccttagggaagtagagatacttcaatttgttgttgttgttgttgttgttgttgttcatctttctacccaaattgatgtcaaggactctgctggcttagtgcctaggattgtctgagcaaagagtgggggctgaaagtcaatgaaggagcttgggaatggtcttccagtcctgagaatttaggcgtggtaatctcagtttagtgacatagcaaagacagaggaaggaggtgcaaacgctgtccttcgattatagagtgtctgggtctccctctcttgcgaccctgtctggcccatagtgtgctaggactgtacctactccttccgggctctgactagatttgtttgatgagacattagaacatccactttggaagatgtaggtagctaacctggctgacaccccctctctctccctgggtcttagccaccattttgccccacctcagacaccactgttatgcttgttcctgtcaactgccccttatcaggcctgtgcctcatcattgccatcatttcaggggtcttgaggaagctcctccttccctctactctctgaagtgaatggttacaatccaatgtctgcagtcccttgtgctggggtctgcattgaatactagccagcagcactcacgtttggtcagcttcttggtcttgacagaacctattcacttcattatcccatgtcaactcccagacagctctacctatagccctttttggctttttagtttctaaagggtgtaggcatagtgtttttgtgcactgtgtaaaggttatctttgtgttcttcaaatgctgatttctcttctctcacatcttgtttctatctgacacaacattgtaatgcttataccaagaatctcctgactcaggtttgcgtaaacaattgttaccatttattctctgccttgtcaataaaagctgatcacccaatggctggacagaagagagaacagggcagaagcttctgccagccaaggggaagggagagagaaagacaggcagacagacagagagacagagagacagagagagagagacaaagagagagagagagagagattcagatctgccagtagaatgaagagattggcccaaggagagggtccaagaaaacaccatgagaaaaaatctgaagcctaatatgcaatatgcaaatataaatgcaacagtaatatgcaaatatcatggaatgggagtaggaggtagctggattagtttatggggttattataaatcatttaactgccccagtattggggtacatctttatactggctagttttttgtcaacttgacacagctagagttatcaccgagaaaggagcttcagttgaggaaatgcctccatgagatccaactgtaaggcattttctcaattagtgatcaagggggaaaggccccttgtgggtgggaccatctctgggttggtagtcttgggttctataagagagcaggctgagtaaggcaggggaagcaagccagtaaagaacatccctccatggcctctgcatcagctcctgctttctggcctgcttgagttccagtccagacttccttcggtgatgaacagcagtatggaagtgtaagccgaataaaccctttcctaccaacttgcttcttggtcatgaggttttgtccaggaatagaaaccctaggacaatcttgaaataaatctttgtttctctgtgtggttacttgcaagggcaaagaaataaagctgatgggtttatttactatttgcacttatattaaaaagtcactaattttacaaaagggagacacagaaaagtggcaacttgatctactctgcatataaatgctgcccgcacatgatcccgagtttcctagtatcctctgggtcttgttcaagaacattagtgctctctccgctctaaatgtatattaagctcatagaggggttgggggtggctcctgggtaaagtgcatggtatacacacttggggaacagagcatggatccccagcaccaacactgaaaaacttgctactcttaccaaggctcagaaaacactgccaaagaggagaagggaagaatgaaatgtgggaggactgggaggacagatgctggaggactgggaggacacatgctggaggactgggaggacacatgctggaggactgggaggagacatgtctcctccagacatggttgttggaccctggttacctgcccaggatcaagccaatcgatatggggacagggtgggagggaaggctcacaaggccccacccctaactaaggagctttctgacatctgctaaggaaaaagaatcttgctcctttgtgggtgtgaatggtcccatacccatgtatgtatggacaacactaattaaattaagtgggaatatatatatatgtatacatacatatatatatatatacatatatatattattttaatttgggagggggtgtgctggggaaattgaggggatttggaggaaggaaatgtgggtggatatgatatttaattgcgtgcatgaacgaaattctcaaagagtaaatagaagaacaaaactaaaaagctgggtgtaacacccatatctgcaagtgcagggctaatgagactaagacaggagaattcagtttatcctggctcctaaactctaggtttaatgggaggccttagatcaaaaaataaggcagaaagtaagagaggaagacactcaatattgatctctatccttcacccatgcatatgcccacacagagagacagagacagaaaaagagagagacagggagacagagacaccaagaggataggtttttagagttcagaaattactacatcacagacacgtatgggtagtccaaagcctgttgatttaccaggttacattttatcaaagtccaccccaatctgtgcttgccggatctcttatcctttccttcattattcatcaagccttgtaccttgttcccaggctaggctggtgttctcataacacaaatgcagatgtatgatgtgtgaattggttcatttctgttggggttttgaaacattaccttgacatgacatgttgaccttgggaaagtacaaaaggggttggagagatggcttagtggttaagagcactaactgctcttttagaggtcctgagttcaaatcccagcaaccacgtggtggctcacaaccatctgtaatgggatctgatgcccccttctggtgtgtctgaggagaaccacaatgtaaatgtgctcacatacatagaataaataaacctttaaaactgtgtgtgtgtgtgtgtgtgtgtgtgtgtgtgtgtgtgtgtgtgtattagaaaaaaatcccaaagtttagttctactgaggcagtggccagtgtgcttaaaaacttagagaccaaactcttatccatggttgagtagggaggagcctagatagtttgctttctttctttgtgagacattatacactgtagcacagggtgatctgaaagtcactatatagcccaagctgtcctgaaattccagaaaactctcctgcctccgcctcccaagtactgaatagcaggtgtgagctaccacatctgattttgactttattaagcatttaccatgtcacctggctccaaggagacaggatgggtcaaccagcccccactagaattccccttgctgcaggagtattaggttgttctgtgtttaagcccacagactctgaagagaacatacatgtatagaagcagacatctccctccgcctcctatagtaggtacccaattttaactgccatggaaccagagctatgagagcatctaaagagcctaatttgaagagtcagaaaggaggctgttccaaagacagggtttgtctttaaactagtaaaattaatagctactactctgttttcttgtttgagacaaggaggtgtagctagaaaaggccagagccatagttctattacttatgtagtagattgtattgtatgagtcaatgggatattgtacagtacttcaaaattaattacattggggaaacaaaatttctcctggcatatgtgtagataaatgagtggggtaaagaaagttcaaatactgggggaggagggtgggactttgccaaatatgtttcatagacactgttgtatactgcaactctgcaacttaaagttaaaatgagtgtatgtgttctgtgtaaagcatacatattttattaatcaaatattatgctccatcttgtcttgttttgtaggaccagcaaaaatccaccaatgtggtctaccaggcccatcatgtgagcaggaacaagagaggacaagtggttggaaccaggggaggattccgaggatgtaccgtgtggctaacaggtatcaacatgtgtgcacacgcgcacacacacacacacacacacacacgcacacatttttcaaactagggtctgacaggctgagagaggccactagctgtcacttacctctctttggcagcatgagatgagacaagtggattgtgacacctttcaactctaaggagcttctcctatgcacccctaagcagatttcctgccacgacaaatgggtttttcctaatttgacagggaacatttggcagcctgtcgggctacggatgtttagagctagctctctgagtgttttgaagttctggaggcctattcccttaacaaagttaagagtttgtgggagaagccgggcgtggtggcgcacgcctttaatcccagcactcgggaggcagaggcaggcggatttctgagtttgaggccagcctggtctacagagtgagttccaggacagccagggctatacagagaaaccctgtctcgaaaaaacaaaaacaaaaaaaaaaaaaaaacaaaaaaacaaaaaaacaaaaaaacaaaaaaaaaaaaaagagtttgtgtgagaaagattgttagatatctcatcttggccacgggttgtcttttgacaacctgtagaaacagctttctatctctgagatgacccagtaaatgtccctttttcttgtcctttttgatccacaagttccaaaacctagagattaacaatgaacttgcaattaggccttaagacccctgatagcccaggtctgagccctaacctgataatagccaggatttagaaagggaaaccctttctaaaagttcacttcatagacaggactttccagaaaaggggggggggagggcagaaacaaaagcatgatatttgagctttgagcaaggcaccattgtgtgctattgtctgctcattcaggaaaatgtctaacctgagagcagctaggaagaatgtggcgctggagggcctgcccgcagtttctcctgcttgtcttctgcttgttgccaatgttccctcgaactgtttctggtttgtgaggtgaggtttcactgtgaagcccaggctggcccaggactcacaagcgcgccctttagccttgcagtgctgggactggagggctgtggtacacacccaggtttgtttgttgtttttttcgttgtcttgctattcttgactttttcctggtgctagtggtttcctggttttattcacagctgggatttgcatcaaaacaacttcatctgtcctctaaaggggaggccagacaatgcacagggagcgagccccaagtgccagtgtgacacacttgcctggcaggacgcctgtagtgtatccctctccctctgggagatggagtttttatgttctctaatgtgcgcccttttgaaaagggggaaaaacaaaaaacaaaaaacaaacaaaacaaaacaaactggtaggctggagattgaggaagtgtaaatagtttatttcctctgacttttcttctcttcaccttttccaaatttacttttatgcctgtgcttcagaggtttgatgtcagcgatgtagaccaaaagaaaccaatgactgcagacgctcagctttgagaagccagtccacctgcctcagctatgtggctttgcacaagtgatttaacctctctgagcccaataccctgatttataaagagctagcacatattggaccctgactcacggctgttgtgggtggaggtgaatgaaatacaacatcaatgcactcatcccagagcttgccccctgccgagacagcagtactgcagcgtgtcccagaggatagccaatgcccagctccgaggacactgaggggaggcctttgttctccaacagctgaggcaaatggaaggaaatttaatttcatcataatgttgcaagaagacacacctgagagtcaaggtccctgtttccattacctcccagctgacataaactctaagagaaatctgttaccaagatcaattcaaaagaaactgtggtgattttggtaaagattattagaaccttccacggccatgtcttcaatgctcccctgtcagagtcaagagttcttgactttaaaacgagactgaaaacctagggactatttaatttcttctcttccctcttcgtgtttcctttgccctgagctctgtcccagctttattgtttaccttttctatgagcacatacatgcacttgcgcttgtttgcatgcatgtatgtgcatgcatgtgcaaacacacacacacacacacgtacatcttctctctgcttttactttttcctttttttctctttggttttcccatttccacattgagttctgtgtggcagacacgttgactccatttgcacataaaacatgaagggtctttcagaaggcacaggcacctaagagctcagaactcctcagcctcggtcagcgtggtcaaccatctctgtgttttaacagtcattttctgaaaactctcacagccaaagggcagcagatgggtctaatgtctagagggtgttcagtgaaatctgcagggagttgggagggtgagcttgctagtcttctgggtacctctccctgtctcctctaagtgctaccagaagaggtaggtcagctgtcaccacagctttgatttctcaaaagcagccagcatctcatttgtatgaagaacttcctaatctttaaggtgtttgcaggtaaaacagcacaggatctaccaccccaggtctccctattgacaaacctcggttgctcaaaaacaaaacaaaaaaaccttccaaactataaaacagatgcaagcacttgggctttgtattctttctagattttaatggttttcatttaagcctagagcattctcttaagagtttagctatgtggaaaggtaccgggttacctcatggtttctcatcttttgaggactttggtttattgagagactagccccaaactcctgatcattctgtctccaccgcacccacacggaggttccaggcatgcaccaccattcctgagttggtcacttatcatcctagtctccctgcctattctcaacaggtctctctggtgctgggaaaacaaccataagctttgctttggaagagtaccttgtatctcacgccatcccatgttactctctggatggggacaatgtccgtcatggccttaataagaacctgggattctctgcgggggaccgagaagagaatatccgccggatcgcggaggtggccaggctctttgccgacgccggcctggtttgcatcaccagctttatctctccttttgcaaaggtaaaagatttggcccagggcgggagctggtatcctcgagtcctccctggggctgtggccctcggccagtggagcggggtggggatggnnnnnnnnnnnnnnnnnnnnatcagaaagtcaccagactttcactttcccatccattccctctctcctttcgggtcatctcatttcctctattggttatgtaaagagagttgcctcactgccagaagccagtgcccccagttgacatgaggccgttatgggtgacagtcaccagggacatgtggtcagagttgaaagagttgagcaagaacttcccagtctgtaatttcgatcgtctgaacaagaatatttagctagcccaagcagagcaagtccactgcacaacacgggcttctgtgggcttagaggggacagaactgaccggggcatccctgctccggtctaaagcaggatatttctagcaaatccttgctgtgttaagagctcagccctgctcttaggggaagttgtgttcggcagttcccttcaggcagtgtgcctatgagagggacatctctgggcttggtgaaaggactctgtcagttattcacctcctcctgttaccccaagggtattaacttcaagagtacacggtgttttgccatgaagaatctcattaggaaattttgtcctaatccatttttcccttataacaaaataccagacgtggtgacttataaagattagaggtttattctgcgcatgactttggaggctgcagaacccaagaacatgttatcagcacttttgttgactgataagaacctcataccgcattttatgcaaaaaagagcaagtgtcaggctcactcaggcctggccctccccttccaagctgtccttgaatctcttcatcctgcttctactttcctggtgctgggtttatgggcatacccctccactcttgctctctttttatatttttaaacacacgatctttcaggatcgtgagaatgcccgaaaaatccacgaatcagcaggactcccgttctttgagatctttgtagatgcgcctttaaatatctgtgaaagccgagacgtaaaaggactctacaaacgagcccgagcaggagagattaaaggtatgaaagtagccagcagcgcctctgaaagttactgaccctgccagtcttctgattctgtctttagaaatctgtctgaagctacacactctgtcccggctgcagaaagcacacgctcagtgtgttcagaatggtcgtggccttttaggattatctttgaaggaactgtcacctcaggcagaaggagtggcattcagagaaagcagacagatagatgaattcagacttaggaatgagtctcgcagaatttcttccttccttcccttttgtattctaatcagcagcagcaggcttggtttctgccgggtgtcattactaacacaaggctttccatactgaaaatacagctgtatctttcttatctacactttcttatctacagcagggagtcaaggatggactgttcaaagtcttagttacaaatcacattttcagcttaacacattagtgcattctatgttgtgcctcttgggttgacagcattcttccacagacacagatatgatttagatcttatactccgcagggtttacaggcatcgattctgactatgagaaacctgaaactccagagtgtgtgctgaagaccaacctgtcttcagtaagcgactgtgtgcaacaggtggtggaacttttgcaggagcaggtaggagggtggttcttgccagtgtgttcagtgtgtgtgtgtgtgtgtgtgtgtgtgtgtgcgtgtgcatgtgtgtgtgcatgtgtgtgtgcgtgtgcatgtgtgtgtgttgaaagataatctgagtttctttattccctggccaatctcagtaactattgccaatttcgtttcccacagaacattgtaccccacaccaccatcaaaggcatccacgaactctttgtgccagaaaacaaagtcgatcaaatccgagctgaggcagagactctcccatcactaccaattaccaaggtaggagaatacagactggtcagagactcaggcttcttagaatctaacattataaactattatacaatttttctttaaaactaccttcagtgtgtgtgtgtgtgtgtgtgtgtgtgtgtgcacgcacgtgtgatatactatacttcatgagtggagtcaggacagcatgtagcagtcagtttccttcttcctttcaccatgtatggggattgaactcaagttatcaggcttggtggcaagcaccttcagcccctgaggcatctcgtaggcccgacaattcctttgaccataagaaatattgagtaaaggtgagtctatgaagacattccccaccccctcaccctgcaaatgtatttgcataggacaatttgcatagctcccctgcaccttcattcctgctgaaatgaaattccagggatcatttgttagcaatggctgagaagtttgtccagaatgtaagtgcttcttcggcaagtgtgaaagaatacaaaggggaaaaagcactaatctaaaacaagaagagcttttcgctgtgtgtctgctgattctgttgcgatgtatacatccatggcacctcaggaaggggtgctggtcctggcaggatgcttctataaacacaaagtggttactgggaagaacatggtttttttgtgccgtgaaatgacagccaccataggcaagaataaaacaaccaacaggtcaaagataagccttttgagaaagtttatagctacagtcacctcacacctgcggaggtgttctatgcataacctcttggataaagcagtcatcctcagatatgtccttagagccccatatctgagatgcaaggccaagtatggagactatatgatacaagatgagcaagaacaagtagttcttttagaagcttctttgcagattgcacccatgccacatcaggaagactccaacctgaggaaaggcagaggcagtccattgcattgatttcgttagctggaagacgtgagatgcaagcccagatactgacctgcttatagcatttttatggatcagtctttcttgtgcataaagatggtcaagtctcttttgctatttttttttagttcattataaatttggagatttaatgagacgggttaatagggtacttgattttggtaattaggacctcacaaatgatttatgaatggagacctctgactttgtataatgaacccaagtgcctccatcctctgggcagacaagtgagcacatcaaagtgagtgctctgagttcctgcatctgagtggtctgaggggcagagaacctcaggacctaatgggtggttcttcgggtcacacggatgacaggaaaggtttcagagcagtgacctgtgtgctaagttttgaagcagtccatagagcttcaagggtggtcaagaggacgaagcatagcctctatcatcctctcagctggaagtggctgtgtgtttccaccacacatttccttggaacattggtaaattggtcccaattggggagcaaaaggagatgggcatcctctgtgactcctagggccagagcttaaagggttttcataccatgataacattgacctttatcttagagtctgtggcttgctcaggtcaggcaaaggatcagtaactgcgtctaatgaaaagggcaagacagccaatatttgggggaggggggaaccagtgaatttttaattttctttcctattatggaaacagttagagctgaaagtatttaaataatctcaattgggagtcatgtgatcgctcttttataggagcgttctaaccctgtatacacatagctggctcctgaatgagaggttcatagagcatgtgggaacacttaggacacagacatccttccgtcatcctcctgccaactgagttaaagagatggagacctaccctggggcctgacggctgagagagagccgccatggacacacccccttgttttctgtgttttccagctggatctgcagtgggtgcagattctgagtgaaggctgggccactcccctcaaaggctttatgcgggagaaggagtacttgcaaactctacacttcgacactctactggacggtaggttttatgttgtctcttcctgcttatcccatgagagatacaagtttgcacatggacaggaccactaacctctggattgaagaccctagaacagctgtattgattactgtgcgtcccttctattacatctgcttccatttttagaaattttgtttttcattctcaaaggatttattatgtaaagccaagttgctgagaaatgaaggctttacttgaaaccatcgcggctccaagttcccgtgttctttgctgggtttggtatgcagaagcaccatgtgggagcatccacaagtttagatctcatcacagtttactgactcacaagcacctcccttcctccacattgcacccatcacaaggtgtcctggtttgaaatccctgctttccttggtggctgctgatctgtcagcgctcgcaccctcacacgacagaggaagatggtttcatcctctgaaccctgacaagggaatgtgatgataacttccataccacggactaatgactttagaaaaacactgatctggtccaggttggaagcaagtgctattcagaattctaagctgctctctaagaatttccttcctggagtcccctgcagtcctcagacatggatttttctatttcaagaccgtggggaaatagctgccaggtagggaagaagttctttagactcacactgaatgtataatcctgggcaaggctttaggcctattaggaagaaaagaccaaatcagatgctcggtctttggaaagattctctgggactgaggctgttgcctagggaacggcctagaagcagaattctaagaccgactagagcacacctttatccctctgctgtgactaagcgtgccccgcgaccagaagcctttgtttccgagattaagcaccatccaaaagcacacttgatttaagcctaccttgctgtaacaggcactgttttgtttgatttttataaaatctctagaaaatacccacttctcagaggaggacactgagctcagaatcaatgctcacatttttttttccagagctgaggaccgaacccagggccttgagcttcctaggcaagcgctctaccactgagctaaatccccaacccccaatgctaacattttaaagcttataagcgatgccccatgaccacagtcagaactcctgtctagtacgccttctgcaccaggctgctctccaggtgtcctttccaatgggctatagaagttcaggatacccaaagaaggaaatacgacatttatcttgatatcttgtttttgacacatactaaacacggctgcatcaagggcatattgggtttagcagccagccatatcagagaggctggctatgaatgagagtccaggctggagctgtgaccacagggaaacgcattgagagaagaggatttgttccaaagagtgtcttgtacaagaatcgctccagaaagaaaaatgcctgaatggcaaatagggctgctggggtcggtgaggtaaagggtccttagcctgaggtcctagactacagaaggaataaagcatcttatgtcttctcttttgagagaggtatgaaaggaaatgttcctgggttgaggtggtagctttctctagatccttaagagagtccgtaactccaaaagatgaagacatagataatccttctggatgactggggcaacagctctccactctctcatatcgtttccatttcctttcgattctatttcccttaaggctcctaacctgatcactttcccattactattagagtccttcctggagtcccctgcccaagcccctctctctgcttgttcaatctcagttctttccaaaacccaaacccaagtgtttgtaggcattcctggtgtgtacttcctgtgtccccacatccagtccaaaactacgtggaacttgctgtgtggatctctgcattcaacattcatccaaacactgaagttctcagtgccagtgtccgtgaacagaaaaatactcactccctttgtgtcagtctcagaccaggacgccctaggaggctgattatgctttaaatcaatacgttcataatctacatggctcgctctatgctgaggctccagcatggatatgttaaagactatgttccaggctggatgtttgtgcactttccataacccctgcaggtcatttctgggactttctatgaggctcactttgttcttaaagaaattctctgttgactgagtctctgcaactactctacagctagagtccactgcacttacatagtccaggattcgaagatctacatggctcccaaagcctcctcggtttttatgtaaattaactgataaaaacagagggcacagagggctcagtggttaagaccactgacttccagaggacccatttcttagcacccacatggcagcccaaaacagggaacctgatgccctcttctggccttcatgggcactgcacacatgtgatgcacatacctgtaggcaggacactcatatacataaggtagaaattttttaaaaattaaaataaaaaatagagggcatgggtctataattcaagccaatttggaggatgaaagagaaagacagcctcgacaagttagtgagaccctacctcaaaagaaaagaggaaaagagagccagggacacagctgtgtggtagtgccctttcctagcattggtgaggtcgtgggttcaattctttgtactgaacaaagatatcatagatgagtctcactcttcgtttagttttagcctagcttgaggtaatataattatataatagtgagagctctgaagctctgaaaccaaactgttctggatttatctgtcagtgatcagctgtgaacctacctaatacgtcaattcactgacattagatctctggtctgcatggtggtgatgataatgatggtatccacctctctgggatattgaatgtttcagaaaaatgccctatgcaatagtaaagtcccatacatgttagctattatcagaaatgcacccctgctacagatggttagaaacctgaaatggcttatctgaagttgtattggcttgagtcagtccagataatgtaattagctccttactgagcatgtacatagcagggctcgcctagctgctgtggacagggagggcctgagaaaagagtagacaggatagcttctctgcccacatccaatggcagaagtggattcttgccacatgccacatctctttaaaccagtgcactctgaattccccaggctgtgacatctgggggaggctacttgagcccaatacacttcccatgccatagtctccttgaagcctgtgcccagtgtgatggcttttaaattgagaaacacctaagctccagaaagtggcaaatatatcagactatacataagaaaatacacacacacacacatacacacacacacacacacacatatatatatatatgaaggcatgtaaggtatcattcatatagatattacttcatctttgttttttggtttttttttcctgttttttgttttttgggttttctttttttgtttttcgaggcagggtttctctgtatagtcctggctgtcctggaactcactctgtagaccaggctggcctcgaactcagaaatccgcctgcctctgcctcccaagtgctgggattaaaggtgtgtaccaccacacccggctattatttcatctttgacagttcatgaaggtttgagtcaccatcgatactgaaataattgtgtggccacagccacacaaccactcagccacacagccacacagccacacagtcacacagccacacaaccacacagtcacaaagccacacagatacacagacacataaccacatagccatgcaaacacacagacacacagaaacacagaaacacacagacacatggctacatctttctacctccaaactgtgaatctcttggttacttacaatctgcaagcaacagatgccaatctcactctgcctcctaaatgaaatattttgttagttttaattttctaaaaggttcccattttaccctgagtttaaaaatacaattcagtctatttagtacaaaactaaaagaaaatagaataatacaaaaacaaagttcctgcgaagcaaccatgcttgtggtatttatgggtttctatttcacatccatgtcttctcttattttctctctcactggaaatatagtttcagggttgtcacgggccctcctagcagaaacgtcccatgtgctgttgggtgttgggataaagagaactccgttatttaaagtctccatcagctaactttccaaggcagggatgcaggtccccacatataccgccagtgtttgctaagcaccacaactagaggttgaggttggttatccatttaacctgaatgaagatgttttagtctttataaggtaaaaagtgttaccaagggcgggaatctcacctgaagcttgcattcaaatacaggttctgatgaccccaacacttgtgtttacttccctgggcatgctgtcaggtcctctaaacctccggctcctacattctacagttgtttctgactacatgttctcccaaagcctggtttggaaaccatttagcaggactgctgaaattaaaagcgtaacgaacatgtgttataattatatcaaagagataatccgttgaacaatgtttttagagtgcacacacacacaaaaacagtattaccatatatttggtgtcatgtgcctgtttttaaaaatagcataagaaggaactgaaaagatgtgcgtgttgcctgtgtgaagtgtcataataggaatttgttcattgacattgttacttaaagatttttgttaaaaaaaagaaaaaagaagaagaaaaagattttcgtggtggagtgctgaaaacatgtctcttgtgtttatatttctctaggcgtggttccccgtggtatgtacttcactttccaagtagttaaattattgtaattagatatgtcatattaatttttttttaaattaaggataaaatttttaagaatccaaattaccagttggaattgctcagttcataatccaaccagttacagtaaaatcataccacatttttctgtttattcaagtccaaacgacaggaaatttctggatcagatgaaattgttttatttgtagtgttgagtttggctgacatcagcaaacatgtttctgagttaccactgcgcactttgttcctgagttcttttgaatttatgatcgtctaatgagttctggttccctttaagtttcagaaaattgaaattaaaattttctatcacacttacaaaacctttttagacagtggagaaatccattttagatttcatttaaaataaatgtatctggttggactatgtacgatcgttccttgtttgtttgcaagtctgattatgcatggacttaattgcaagctatagtaattgatggttacagaactaaaaatacacacttaccgagactatgaatttctacattgtgtcagaatgaggtaaaattccaaacgtatcatttgtctcagagatcatttttatcattttttttctttaaaagaccaaattatgcaataaagattaattttattttttggaaagaaaatgtctaagcagccaataagtagatctacgatgctgaagagaaaagacttgacaattgtttaaagcaaaagaaaaataatccaatcagacaggaaattatctgttgggtttcctatggttaaaacaacaatactcttccaaaaacaagataaaacataatggaccagtcaagggaactctcaacagagctgaaacacatgaagggaacagccaaaggctcgaggaatgtctgaagccacagaggatgctcggctagctcagctgtagcacaggcttatgtataaaaacaaaccggagagcctggagagatggctcagtggttaagcgcatttgtagctcttgcaaaggaccgggacttggttcctagcaaccacgtggcagctcacaaccatttctaactccagttccagggaagctgactccctcctctggcctctttgagcactgcacatacatggtatgcaggcaaaacacccaggcacgtagaattttaagcgtcttgttttattttgttttctaagtagaaaagatgctggagacaaggtttcgtggttaagagcacgttctgctcctacagagagaggatgggagttggagtcctagagcccatgttgggcatctcacaaccatctgtaaatctagctccaggggaatccaatgaatgcctccgactaccatgaacatgaacactcacctgcccttaaccacacacagatacatataatttaaaaataagtcttttaaaacaatgtagagagaaggctgggactgttaataaggtagaccgcttgcctcctgtgtatgaagccctgagttcaatccccaccaatgccacaaacaaacaaatatacatacatacatacacacacacacacacacatacatacatatatatatatacttatatacaaaaagccaagagcagaggaagaagctagagacccacattaagcgcgtccacgcccacacagctttgcagtcctgggcatataggagcacttgggattattacttagcaagagtcctgtccatgtgagaccacaagtgagtcttttatcttgaaaagagggagagttccccatcactgtgggtgttcactaagcccagtctgcagctggaaaacaacgtgtccttgggacatcagtgttgctggcgtgctgcaggcgcggctaggcttcctgatagccctttgacctttgctttgcagtttgctttctctccgtctagtcaagcgtgtataatcagaatggagcatggcggtctctctctgtggtgtcctctgtatgccacctacagagagcatgatttctccttaggactggagcattcctgaatgtgttgccctttattagctccccctttcctggtagtcttagttgtggttctattaatacgtactttacagctgggtttccccggcaacctggggagctacactctgctacctcgttttttatcaagaaaaccccactttgagtttggtgttctctgcaaaggggctgggtgctcctgcttccagtgatctttgagagagagtcactttgacaacaaaatcttcctacgtgctatctaatctgcagtctgtaaaggcatcgactggatactgcaggcttttatggcagactcgagtctgagccgctggcagctgccgttggtacctgggacgttcttttaggtcttactaacttgagagagttggggaggacaaagtgatatccctgcaactgggcttcatagctgccaaggagttttatatcccacacgagaacaacacagacctttacctgtcagatgcattctaaagtatttgacatctggggacttcattgattcacatttgctcgcacccacaaataaaacaagtgtattctctatccctagaggatgtcctctttgttcggccctcccattcgcttccgaaccctgatctcactctgggtctttcatgttacacatcaaaccaaggcccttattttttttatctgtacatacagtcgagagagacagtcaagttagaacattgagcatgcaagcaaaagagagacaaaaggagacagtcataattttcacactaagaaatcatcattaagaaatgagagccagtttttttttttaagtttcaaactggaaagcaattacatctttttaaccattttatctaaaaattcttcaaaatgttcatacttcttggagggtctgggagtggagtttgagatagtctcagcccaggctaggctcaaactcactattatagtgcaggatgctctgaagtcctgataatctatcctatctctagccccaatgctgggtttacaagcaggcatggttactacacatggctactgttcatattaaaacaacacaacaaacccttcgctgggcctgatggtacagggcctgtgttcccagtacttaagatctatcagcagttcaaggtcatcctagcctattagttctagggcagcctgtgctacaagaaactttttcaaaatcaaaacaacaactaaataaaccccacaatttttaaagcctcctattcactcacatcacacataaaaattgtttgagttggtacctcattgataccctgcttgcctagcatgtgaaaggccttgtagatttaacaatctacagcttcactaaaacaaacacatgtacatacagaaactcacacacacagaaatatacacacacatacatatacacgcatatgcaaatatacacatacatgtacacatatacacacatgcatacatacatacatacacaaacacaccacatatgcacacacatacacacactcctcataaggaaacttgagacacctctagggtgtctatagtgagaaacctctttgaatttgtattttttaaacttattttaaatgatttgtctatgtgtgagcatatgcacatgagtccagcagcccacagacaccagaggcatctgattatctggagctggagatataagcatgccgagctgcctgctagggtcctctgcaagagcaggttgtgtccttaattgttgaaccatgtctgcagcaccttacttttttggtttgtttgttttgagaaagggtaactaatactctatattttacattagatagatagatagatagatagatagatagatagatagatagatagatagatagataggatatagatatagatatagatatagatatagatatagatatagatatagatatcaatgctctccagagaaacaaccaagagagagaaagagggggaaggaggaggggggaggtgaaaggatgggcaggaagagggagagggtgagagtcattggctcatgtgattatgaagcctattgggtttaaaatctgaaaggccaggaaaaggtacaatttcagtgcaaggccattctgctacctgaatcgcctcttctggggaaatgggtctattttttcaatcctttcactgattggatgagacccactgctttaaatgtcaatgtcatctaaaagtaaaatccacacaaacaactgggaatatttgctcaaatgcctgggtaccatggcccagccacatcggcacagaaagttaactgccagttcttccgtctggtgtctgcaaagctgttgacatgttatgaagatgtactgtgttatatgcagaggaattagagcagctagcttcctctacgtttctgttaaagtgggaaactcggcagaggtaggaaggtcttacttgctagagaaagtacacacttaggaaagtttagcaagtggctttgtaccatttttcactttcatgttcttttaaaagatttctttatttttattatacatgtatgggtgttttgcctgcttgtatgtcagtgcacaggactgcaatgccttatagatgccaaaaggggacacctgaccctcatgaaatggagttacaactggttgtgagctattgtgtaggtgctgggaatcaaatctgtttcctctgcaagaagagcaagtgctcctaaccatggaacagctctccaagccctacagccatggcttttttgagtgatggtttttactgtagctgagctagcaagactgatattccccagagaagtgagcttaataatcccttaacaacatttgaagatagagcttcatctggactagagtagccatcaaggggctgcttgtccggggtgtgaactcggattttgttcccctttcttttcagttcagttatgtcagcaatgccaaacactgtgtcggcaatgccaaacactgacacagcttcatttccaagaacaagaagagctttcggtttggccagtcttttgttttgtttcattagtttttcacagactaagctttgggctggagagatggctcagtggtataagagaattagctcttcttccggaggacccaagttcagttctaagcatccatgttaggaggctcacatctgtctataactctagctctgggggacctgaaaccctcttctagtctctgggtgcacctatatgcataatacatatgtgtgtgcatgcgcacatgtaaacacacacactcctaaataaataaataaataatcaatcttaacaacaacaaaagacttcactcttgatagtgcagtaatattagcaccaaagttttaaaaggcaatctaggcaagttatctccatcttgtcctcaaagctaggtcacttactgaggcaatttacaccaggaattggtcaagaaactcctaccagtcttaaagaaaccagagcagcctgtctctgttggccttgggtcagaagaggcttggaaggaggactgtacacatcttagccatccctgaagaatgcctcacgtggaatatgacacttatgcctcacgggggggtctttctgcagatggagtcatcaacatgagtattcccattgtattgcccgtttctgcggatgacaaggcacggctcgaagggtgcagcaaatttgccttgatgtacgaaggtcggagggtcgctctattacaggaccctgaattctatgagcataggaaagaggagcgctgttctcgtgtgtggggaacagccactgcaaagcacccccatatcaaagtaagtacaaaacctttgcaaggacttaagaaaaaaaaaacaacttttgtgtctgtaggtttggggtagggaggtacacttgtatttataggtgtattattgcatgtgtgtcagaggtcagaggacaaccttgggtatcatttctttgggtatgtgccttcaacctttggtttgagacagggtctcttacaggcctggtgctttgccagacaggctagactaactcaccagggagctttctagcatcttcttgtcacttcctctaacctctccatcactgagaccatgtgcatggctttttacatgcattctaggggtcagaactcaggccctcaaacttacgaggcaaatacttgactaacggaaccatcattccaagtagaaattctgtttgtttgttttttatgtgtacatatgtaatatatgttcatgtgtatgcacatgtgcatgagcgtgtatatgcctgtatgaatggacgtggaggccagagaacaacatagagtattgtcctcaactgctccctaccagatggtttgagtcagtggctcttaccgaacccagagctccccggtttggtaaagctagctggccagcaaactctaggatgtgaccctctctgcctctcagggcctggaggacgaccatgtgcctctgcacccagatttttacatgcattctggggatctaaactcaggtccttcttcatgtcatgcttatgtagcaagacctttattgcctaagccatctccccaaattcatggttgagtaaagaaatgttgtggtggttttgtttcgttttgttttgtgtcctgaagccaggtatgatggtaaaacccataaatcccaacactacagctcaagaggcaagagcggcagttagcagttaaatagctagtttgctagtttaaggctaggtttggttacagaagactacatccaaaaacaacacaagccccatccccaccccctgaaagtgcataaggatcacacgtaaagaacccaagcaacccctgaaaagaactcagagctcaagtcctgtggccagcgaacgggagtcaatgacatctttctataaacacagaccagtacacatggtggctaacttccaagaagatactacattgccatcagtggctgttcatctgaccagggtgaatgctcctccctaaagccaaatcagattcctcagcgacttctaatggcagctggtgacacagtggtggggaggagctagcgagggggtcactggatagaggccacttcctgtacagctctgtgaaactgaatgcaaatccattctttatcagagacaggcatcagggtggaagtgaagagagatactactaatctaatttgacttcttcgcttccctagcttggttagctttcctctattttttttccccctttggttagctttcaagctcatgggtaacaccaatgagcagtcaagccccagagggctcccaaggaccttgtgatagacaaagcacactgtccttcgtttgtcttctggcaaaacgatgaggccaaaatatattgaaaagcatttcctgcccgatgaccttgaagaaaaattacatttttcagttgtgaaatgttacaagataggaaagacatgctcaaggcccagcgagcggcccctggagcctccttattctcaacagaaaaagctcagagagcaaaggaagccagctcttccacttactggacacaaccctcagccttcaagataaacctctccgcatgcacaggcagctcagagtcatctgagacgtcctccctctgagtctggcagaagatctttgagatagctgctccaggaatattacatttgggccttcagttacatttctgaccatttcttttatgattgtaatcacaaaggtttgggactgtatctttcttcagtggcctgaagaataacggtctatcattatctcctctttaggttcaacccacatgacctacaccaaagacataaagctaacctcagagaatgcttagggggaacttgaatgacttttttttttcccatcttgtcttgtaattatcagccattacagtcagtttcttagaagccaaggagattggtggtgtgccctttgtctttgacagtattgtcggtgactctacactactgttcataagaggagctaatgacaaaaaccaggtcacagatagccagagagaaagcattcaccccacacccattacactggggttgcctaaaggcacattcagcaaggaaacagcacatgagttttactgggtagaagaattcttacttaacacactgaaactcatcctcatactttaacattttttttttaacacaaaatctcttaatggttttattcacaaaaggaactgtggccctcgtgctttcaagtggccctgggaatgtttgcagagaattgtcagttagccaggcaatggcctgcctctgttccacagctccctgactatggtcactcctgagctgtcttagagttctactgctgtgaagaactgcatgaccgtggcagttcttataaagaaaagcatttcactggggctgccttacagtttcagaggtgtagattactgtagtcatggtggggaagaatggcaatgtgccggcagacacggtgctggagaagttgagaattctacatccagatctgcaggtagcaaggagagagacattggtcctggcttgagcttttgaaactccaaagcctaccccaatgacatacttcctccaacaaggccacccctcataatccctgttaagtggcacgactccttaatgaccaaacattcaaatatataaatcttgatagggaccattcccaatcaaaccatcacatgccctttctactcaaggattctcagagtcataaagtacagaaccaaatggcatgatctcagggtcactgtgaggaacagctagaatgtatgggagtagtacttagaggaaacccatgaccatggtgctctgttttaccaaccaataatttttctcacagttctctagttaagtaaataaaaatgatcgctcttgttttaaagacatagaaatcgggagagcaaagtacgtcttcccaatgaaaggcaggagcagaggtttttgtccatatgaagaccagctggacagcaagttcaatcgaatcactaaagaattgtgcagattatgccagtcagaatggctcatactttgattccagcaccagagagactacagcatcatgaggagcccatcatgggccatatcaccaggccctatcttaacccagacgaggtctcccagaatctggcttgattggcttggggtcaggttggtcctggggagtttgaagctgaccatgatttgcacacgctatgagtattgagaaagccttggttacaaaacgattgagagctttatctagatgtgtcttggaagtgcttcagactcagcatgtcaacctctccctaggctcattattcctcaagtctcctacctggaagctccgtatgtatccacttaacctgtaaacaaaaccgacacgccattgtgacttgttctttccctttcctattcaattgttaagttctggcaactcttccaagtattactcaaatatatcaattcactcctgcttcagtttgggccagatttcacatccattgtttcctgtttatgtgtccctaatccactgtctattctttggccagagtaaaccgttcaacctttatttgggatccttttcacaaagatttacctggggtacctgtagcagcagcacccatacacttctctagacactccagagctggtcattacatcatgctagttccttccactcccacagcatcatcttattccctcttttctgaagtcagtcctaccttgactcctaggtacgactcagtggcctaatacctatagcaggcaatactgagggtgttgctaaaatatcagcctggggaccactgatgagagccagtggatgtggtagaaaagaaagtttggttttctcaagttccatatttaggtcctgactttggtacaatagctgtgtgcaccttgactctaccacttcctttctgcaagtggccttcttatctgaaaacaaagatgttaaactttcaagatcttcaagccccattaatattgccaagtgtctcaactcaccagcttccagtaatgacacagagactttatttatgaatgcttaggtcttatagcttgggcttcttctcaattagttcatataacttaattaacccatttattttaatccatgttctgtgactcgagccattacctttcctgcagtcctaccttctgttccttcctctatgtctgacttgtcccatgcctgattcattcccagagttcctatctctgcccaggtgtgccaccgttcctctcctgccctgctataggccatcagctctttattaaactaattagaagtgatagagaaggcaggtgatgcttcatgaaaataacagtaccaaagtccagacagtactcagctctgctggtacagaaatcaacatttgaaataatataaagacaacctttacaccgttcacaagattattccaacactttaagccttaatcagatggcttggaaaggagtagataattcttagctataataacattccagaccctccttcctgggagcaggacacagttctggggatggtcagagcaacttacagacacagctaccttgagagttgttcccccactccagagataacaggagacagtttcagcatcaatcttcacagacctgctttacactgggtggtgatcaaagtcactccagtgctgggttcaccaagacagcagcctattgtagggttgaccctaagaatcacaagaccctatcttaaataacccagacgaggtctcccagattctggcttgattgttacggaactccttgggatttgggtcaactttttcaaagttttctttaagcagtgaggacaaaaccatgtatagtattagtatttgaaaatatcagtatacaatgtttgcctgagcgcagagatgagaaaggaggtcatgaaaacagagccaagccattgcaccattacctccagggtttctcaaactcagcaccatgtcctgttgttgttgttgtgaaggctgtttttaccaggtctggagtagttttctgttctttctagataagcgataactttgtagcccaggttgcattcaaacttcaatctcctgccttggccccatgagtgctggtgttataggcatgagccactacatccaggttgtaacaatggcccctcgtgatgtaataggatttggaacagtcatcctgtagagagattattttccccctattttttagttcaaggaaacttttcagttcatggtagtcccagctttctacttttgtttttgtagtctgtgcgttgggtgctacattcaagaagtcactgtcaacgccaatgccacaaagctttgttccctttattttcttaagcattttctaattgtaatccatcctaacttttgtgcatgggatacacttcttccttttgtgtctcgtctctgcaacatttgttcaacagtctgtctttcccccagagttgtcttagcatccttgccagagatctttgagaagatggggtttcagcaattcgtctttcttgcactatacatggatttttgctccactttgttgctcaatggattctcttttatttaattgggtataaatgaaggaggctgcatctggggttaatgtccatggaaattatgctaaacaataattacctggcaggaaaacagtacaaaacttatcttgaaggtttctatttgggagttctattgagaataatataaaatatattggatggtattagggatgtgccagcagaggttctcaaagcatggtccacagaactctagcaatactcaagacttagcagaaaactcccaagtgcagagccgggtatcagtgttagggtttttttcccagtgttgctattggcatggctggtacaaagcaataaagggcaaactgctggtgcctcctccagttatcacaattgtactaataaaccaccagcttcactggaagtcattctttatgatgctgaaaaaaaaaatggggctggagagatggcttagtggttaagagcaccaattgctcttccgaaggtcctgaattcaaatcccagcaaccacatggaaaaaaaaaaagctaaagaagggaaaagtggtcaacctcatattgctgggctgtggtggcgcacgcctttaatcccaggacttgggaggcagaggcaggtggatttctgagttcgaggtcagcctggtctacaaagtgagttccaggacagccagggctatacagagaaaccctgtctcaaaaaaacaaaaacaaacaaacaaacaaaaagacccttgattccatattgttgattttttcccccataacttattccagaaaagtgcaaaaaacacttctacagacaccaaaactggtgtaaggaagagttcttgtcaagttgtttgagcattgggaaaaacagctatgcctccctcacacacacacacacacacacacacacacacacacacacacacacacacgagtaatttgtagcttacaaaatagtaataacaatcagggaagataccaggtgctgacttctgaactttacacgctcgcacacatatgacacacaaaagtgtgtcatatacttgcacatacttgcaaaaaggaaatttgcttaaaagcttaacacggtagtaaatgcctatgatattatcccttggaaagctcaagcaagaggacactgagctggggacaagcctgggcttcacagtgagatcctatcaaaacgaggtgtggggtgggggtgggaggagctagtatattattatagtatcaaagactatccaagatcacataagaaggctcttcaaatcctcttcctccttcaaatcctcttctagctatgttcctgcagttggattttcttcttacagatcagtcaaaactcactggctcggattaaatgcagtagctgtgaaaaatctgtcttctgttaagttgtacttaagcagagtagaaaatagtaaaagtaacgccagccttcctatttgcggggagtggaggagaggatttagttttaacaagaaacagattcattaccactttttttccgttaatttaacaatgcaaaaatgtatgtgttgacttgaccgatacatgtaacttttttctcatatcctcaactctatcatatcctcaagtctagaggaatgactgtgatcaccacatgacgtagactgttatcatttccaaagtttactccaatccatttgttcttttataccacaaattatcttcattgtgttgtccgatgagataaatccacacgaaaaccaaggtgccaaaggacagcccaactttcacccagttagatttggcattgactggctcccagatgcagaactttgaccatgttaaagagcagctcagcaggcagacaggcaggggccagcagctgtgaaaacaagcccagtactagggacgatgccatcttgccctgcctcattacaacttttaaatgacgtttctcagctttaatttctaatatgttagctgatgatataatccatataaacaaaaactttgggagacagtccgcaacttttgtgttgtgtgaattcgctgctggaactcgcccagggtcttgtccatgctacctccctagcaatgttttgtgaaaaccacaagaagttaagaaattaaaagttcgataaatactatttgaaatgttgcagaacaataactcaagatgaattaaaaagaaacccaggagggctggggaaaaggctcagccagagtagagcttgctgcacaagcaagaggacccatgtttaatccctgcagaacccatgtaaaatatccaagtgcaatggccaggaagtttaaagacaggcaggtaaaaacaggcagatcctggggctcactggccagtctgtctagccaaatttgcaagctacatgatcagtgagaaaccctgtctcaaaaaataatgtggggctggtgagatggcccaccagcggttaagagcactgactgctcttccaaaggtccagagttcaaatcctagcaaccacatggtggctcacaaccatctgtaatgaaatctgatgccctcttctggagtgtctgaagacagctacagtatacacacatataataaataaataaataaataaataaataaataaataaataaataaatctttttttaaaaaaataaaataaaataaataaaaaataatgtgaagggctattgaagaagtttcccaagtctgtgcctccacacatacgggcacttgcctacacaaatatgcacgcacacacagacagatacacacacacacacacttcaaataaaatttaaaaatcagcatagttaccattaactttagtgattttccttctagatggtgatggaaagtggggactggcttgttggtggagacctacaggtgctagagagaataaggtgggacgatgggctggaccaataccgccttacgcctctggagctcaaacagaagtgtaaagacatgaatgctggtacgtattcaggttctagagtatttgtcaatatgccttagcactctagtcaaaaatttaagtgtattatgaattggattttttctttttcccccatttaggggctggcattgaattcattatatagccaatgataaccttgaaaactgactccctctctctctttagttaagatttatttttacgtatgtgagtacactgtagctgtacagatggttgagagccttcatttggttattggggatgaaatttttaggacctctgctcgctccagtcaaccccgctcactctggtcggctccactcactcagtccctgctaactctggcacaaagattcatttattatacataaggacactgtagctgacttcagacaaaccagaagagggcgtcagatctcattacggacggttgtgagccaccatgaggttgctgggatttgaactcaggaccttcggaagagcagtcaatgctcttactcactgagccatctcgccagcccaaccttgaactcttgatccaacttctgctcccagatgctgacgttataggcatgtaccaccacagctagctgaactatatatatgaataaagacagtcaggtttgctgtccatagattatactgctaccaagggccatattaatgtgagtggcgtgcgctgcgacctgagaccatgcggatgcccatggtttgtgttgcaacctgaaatcatgttgatatctgtgggccaagttgctgccaaaagccctggtgatgtgtggtccaggttgcctctaagggccttgtctgggtccatggtcctaatgcagctagagcccatgttttggtctgtgctgtgacagaaaccatgtagatgcccatgatccaggctccagccgactgtagggagcaaggaaactcatttgcagggatgttgatgaccgcaggtgcacagttgacaaagagggtaggcttctgtgacaacgcctacccccaccccaatcctcactctcacaccccccaaaagaagtagcctaagcaggaagccattgaagagaactcttaaagtgtgatagggatgctgagttgtaggtctccacaattgatggcttctgacaggggtgtggaggtgatcaactcagttctatttaagggcaggccactgagagtttggccatattccaaagaatatacaggcaacacaaattggacctgcttggctttaattttttttttttttttgaggggaaaggtcacgaagagagtggacatggggaggactaggaaatgggtgtgatgggtggtatatgatgtgaaatgtccaaagaaacagtaaaaatactatgttgaaaaaaagaagtatcttacttttaattagatgggggggggggtgtatatgtgtgcctgtggagtcagatcccccagagccggagttctaggcactttgtgagctgtctgacgtgggtgctgggaatcaaacttgggtcctccaaaagagtaataccgttcttaatcttggtgccatctctccaagtgatgagatctgttggtttgtctggatcacagttgtgctacactcacatgctagaacactatgcagcagtttaaaatatgcaagtgcagaataattcctagagtgtatctgtcgagtgcaaaagcatttgcagaatacacacacacacacacagcacaggcaacgttgaaaaacaagaaaattgaaaaaaaagtacttaacccacttctatctatagaagcacaaaggactctgggagcaccagactgccagtgacacctcttggggtggagggtagggggtggaacaagaaaggaacccccttcacatttcatgctgtacattttaagagagaagtaatgataggaagcaatgattttcattattcattttgggcttttttatatttcctaagtttcctacagtggaaatatattaattagattttagaactagacaaaaaaaaaaaacaaaaaacaaaaaaaaagacttcatgagtccatcctgagtgccttttcttcaggatttaaggagaaggtgtgcttttcatctgtagactgtcgtctccatgcacatttctgtgggctctatatatgtgggctcataaaggtacaagggggcaggtgaatgctagagtccaggatttcagaaaaagtgtaagacagcacctgttttaattcctgagtcctgtggcttcctgcctctgcatcctgtcctgtccaagcaattgagttaacaacccaggcatggtctcccattatcaacagctagaagactgaatcctcccatctgttcttacaggcaagcaagattgttaactttgaaccttggctcttcctttctagatgccgtgtttgcattccagttgcgcaatcctgtccacaatggtcatgccctcctgatgcaggacacccgccgcaggctcctggagaggggttacaagcacccagtcctcctgctccaccctcttgggggctggaccaaggacgatgacgtacctctggaatggaggatgaaacagcatgcagctgtactggaggaaagggtcctggatcccaagtcaactattgttgccatctttccatctcctatgttatatgctggtcccacagaggtgagcaattccctgagctgggccaaacatgaagaacaccggctaaacgggcatggtggcacacacctttaatcccagcactccgaaagcagaggcaggcggatttctgagttcaaggccagcctggtctacagagtgagttccaggacagccagggctatacagagaaaccttgtctcaaaagaccaaaaaaatataataataattaatttgccgggcgtccccagcccagcttaactttttctaatgtgtatttgtaaagatgctagaagcatcaagtccaacataaacatattgcttggagaatatggaggttggcacgtgattgagataggtagatagcacagctcacctgagtcagtcataagacaagtcgtatctgtgttacctttccgttgatgtgataaaacaccatggcccacataacctgagtttatgtgggcttatggtgccagggtggtaagtctgtcacagcagggaagcctggcagcaagtggcaggtttgagggcaggagaaggaaactgagagctgacatcctttaccataagcaggaatcaaaactgagagcaaactggaagtagatgaagctttttaaactcaaaagcttacccctagtgacatacttctgtcagcaagattgtaccacctacacagccgcaccaacgtgggaccaagtgtttaaaatgtctgagactaagcgcaaccgttcacattcaccatcacgaaactaacaagttattagttccagttgctctctatggctcaccatgacccaggaattgcttagaaggtcattcagtaattagttcattgttggcagtcaggtgatgacttagaatctgtcattcagagtcctttgtaacagtaagtattcttaattgcttgctttattaagaaagactcttatagctcatgactttaaaactccagtcttatccaatataacccagcttgaatagtgctagaggcttagactcacagacttcctcactacttttaaatgacctgcccctttcagtcacttcaaaagcaaaattaaaagaatcggcataaagaggaacccctgaccatcatgtcccctatgtgatattttccaggtccagtggcattgcagatgccggatgattgcaggagccaatttctacattgtgggtagggatcccgcaggaatgccccatcctgagacaaagaaagacctatatgaacccacccacgggggcaaggtcttgagtatggcccctggccttacctctgtggaaataattccgttccgagtggctgcctacaataaaattaaaaaggccatggacttttatgatccagcaaggtaggtttctggagaaaaaaaaaattaattgacatgacaactgtcctgatgagggaaaactttgaccctctggaaaaagtctccagtctacaggcttccaatgggaaagacacccttgagttatagacctgctcttgcaaatgctgtgtcccctgacattgttggcagagtcctctgcatgtaggtgttggtctgtaaacatttctctttggtccgatggatatagcttactagcagaatacttgcctagcatttgcacagccctggctttgatctccaggaaccccacagaaagttcttgagctgggcatagtgctacatgccgacagtcacagcacaagggagctagaggcaggctggtcatctttggctacatcaagctttaggccaggctaggctatatgaaactccatagatctgccttatgtagacacctaacacctaacctttaagtgaaaggacatggggagagacacttttcaatgagcacttatggcacatgtctgttccataccaacttcacacaacaagttaatctctggcctcaagatataaaagagaggtgtgcaagaaccactgtgcaaacacctgcttttatcccttctttgttccacaagattcggagctaaagactgagacaactgcccattttaaaacatttggctgtttacagaaaaaagaaaaaaaatgcaaaataaaatcagcaatgtagccccagggatctttaaagagctgctacttccctctgctgaactctctgttgctgtactgacaggcacgaggagtttgacttcatctcaggaactcgcatgaggaagctcgcccgggaaggagaagatcccccagatggcttcatggccccgaaagcgtggaaagtgttgacagattactacaggtctctggagaagaccaactaggtgctcctggctctggcttcttcctcaagtgctctctgacgattttttttttctatttttgtgatttagctgctctgtatccaattgcttctcggtgactttttaaagctagtatttttgcaatgaagtaaaaagctgtaaccataatttaaaaccaagttcattatgtc

SEQ ID NO: 30 - DNA, 3227 bp, Mus musculus
tcacagttgtcactaaagccttgtcctggagtcatgttttctgtttaaaggttcccaaatggctccatttgtttaaccaatatttctaaatccccagaaatcctttgcagactcaggcagggtttcccattttcaaagcatagctgaaagttgaactggcaggagacgagcatgtctttaggccatggcatctttgctctttctgtctggttccatctttaccacaggcgaatgaagaaacctaaggacattttgtcttgtttcagtttgttctcttgattgaggaatctcctcgacccatgtggcaccttcattttaatgtttttaggaaaagaaatgccaagttcatattttgttttgttttgctttgtctataaaatcttcagaaaagcacgggttgttggtttttttttttttctctgtgttttgtcatccagagacactcagatggggacatcaagaagtctctgggatataagcgaagagctatgaacatgtcaccatctgtccatttaccatatgatatgaggttctctgctcttgtgtctttccttgggcatttcaggaagttttttaattctaccaatgtcctgttggcttggtataatgacaagaactcatggggcactgcctctgcctgtcaggagcccacaccttatcccatcaaaactacatgctgggtaggcacccagaggacatcatggtccgtacttcctgagctagaaaataaggaataatttattcctttatagattccagtatagatttaaaaaaattaataacagaggtgattaggtatatatgtgtaggtatgttttagttattgtttttctccaagcagtttattaaagtgtgcaggctgacctccgtagatcattggcctttccttccacactagaatttgtgagttgtgccagccagaagaggaatggcagggttccaaaaaaaaaaaaaaaaaaaaaaagagtccttgctcattggttgatagagggggagggtgctgcagtagaaagtctgaattcagggttctggagtgtgaggttgccttctcttccccattcccattcacacccacctcacagaccttcacagactctgcagctcattcattcaccccaatggccagcaaagccagtttgtaaccgagtattctcaacatcagatatcatgtcttggaggaagttacctaaactctgaagaattatcatgtctgcaaatttcaaaatgaaccataaaagagaccagcaaaaatccaccaatgtggtctaccaggcccatcatgtgagcaggaacaagagaggacaagtggttggaaccaggggaggattccgaggatgtaccgtgtggctaacaggtctctctggtgctgggaaaacaaccataagctttgctttggaagagtaccttgtatctcacgccatcccatgttactctctggatggggacaatgtccgtcatggccttaataagaacctgggattctctgcgggggaccgagaagagaatatccgccggatcgcggaggtggccaggctctttgccgacgccggcctggtttgcatcaccagctttatctctccttttgcaaaggatcgtgagaatgcccgaaaaatccacgaatcagcaggactcccgttctttgagatctttgtagatgcgcctttaaatatctgtgaaagccgagacgtaaaaggactctacaaacgagcccgagcaggagagattaaagggtttacaggcatcgattctgactatgagaaacctgaaactccagagtgtgtgctgaagaccaacctgtcttcagtaagcgactgtgtgcaacaggtggtggaacttttgcaggagcagaacattgtaccccacaccaccatcaaaggcatccacgaactctttgtgccagaaaacaaagtcgatcaaatccgagctgaggcagagactctcccatcactaccaattaccaagctggatctgcagtgggtgcagattctgagtgaaggctgggccactcccctcaaaggctttatgcgggagaaggagtacttgcaaactctacacttcgacactctactggacgatggagtcatcaacatgagtattcccattgtattgcccgtttctgcggatgacaaggcacggctcgaagggtgcagcaaatttgccttgatgtacgaaggtcggagggtcgctctattacaggaccctgaattctatgagcataggaaagaggagcgctgttctcgtgtgtggggaacagccactgcaaagcacccccatatcaaaatggtgatggaaagtggggactggcttgttggtggagacctacaggtgctagagagaataaggtgggacgatgggctggaccaataccgccttacgcctctggagctcaaacagaagtgtaaagacatgaatgctgatgccgtgtttgcattccagttgcgcaatcctgtccacaatggtcatgccctcctgatgcaggacacccgccgcaggctcctggagaggggttacaagcacccagtcctcctgctccaccctcttgggggctggaccaaggacgatgacgtacctctggaatggaggatgaaacagcatgcagctgtactggaggaaagggtcctggatcccaagtcaactattgttgccatctttccatctcctatgttatatgctggtcccacagaggtccagtggcattgcagatgccggatgattgcaggagccaatttctacattgtgggtagggatcccgcaggaatgccccatcctgagacaaagaaagacctatatgaacccacccacgggggcaaggtcttgagtatggcccctggccttacctctgtggaaataattccgttccgagtggctgcctacaataaaattaaaaaggccatggacttttatgatccagcaaggcacgaggagtttgacttcatctcaggaactcgcatgaggaagctcgcccgggaaggagaagatcccccagatggcttcatggccccgaaagcgtggaaagtgttgacagattactacaggtctctggagaagaccaactaggtgctcctggctctggcttcttcctcaagtgctctctgacgattttttttttctatttttgtgatttagctgctctgtatccaattgcttctcggtgactttttaaagctagtatttttgcaatgaagtaaaaagctgtaaccataatttaaaaccaagttcattatgtc

SEQ ID NO: 31 - protein, 606 aa, Mus musculus
ANFKMNHKRDQQKSTNVVYQAHHVSRNKRGQVVGTRGGFRGCTVWLTGLSGAGKTTISFALEEYLVSHAIPCLDGDNVRHQKNLGFSAGDREENIRRIAEVARLFADAGLVCITSFISPFAKDRENARKIHESAGLPFFEIFVDAPLNICESRDVKGKRARAGEIKGFTGIDSDYEKPETPECVLKTNLSSVSDCVQQVVELLQEQNIVPHTTIKGIHELFVPENKVDQIRAEAETLPSLPITKLDLQWVQILSEGWATPLKGFMREKEYLQTLHFDTLLDDGVINMSIPIVLPVSADDKARLEGCSKFALMYEGRRVLQDPEFYEHRKEERCSRVWGTATAKHPHIKMVMESGDWLVGGDLQVLERIRWDDGLDQYRLTPLELKQKCKDMNADAVFAFQLRNPVHNGHALLMQDTRRRLLERGYKHPVLLLHPLGGWTKDDDVPLEWRMKQHAAVLEERVLDPKSTIVAIFPSPMLYAGPTEVQWHCRCRMIAGANFYIVGRDPAGMPHPETKKDLYEPTHGGKVLSMAPGLTSVEIIPFRVAAYNKIKKAMDFYDPARHEEFDFISGTRMRKLAREGEDPPDGFMAPKAWKVLTDYYRSLEKTN

SEQ ID NO: 32 - DNA, 88070 bp, Homo sapiens
cgcgtgccgggcgtgccatctgccgctccgctgcaaggtctcgcccgggaccggggctggcggagcgcgcgcccgcgagtaggggccgggccggggaccccgcctaggcggcggcggccgggtccccaaggctgggcgctgcttgcggaaccgacggggcggagaggagcgtggcgggaggaggagtaggagaagggggctggtcaagggaagtgcgacgtgtctgcggagcctttttatacctccttcccgggagtccggcagccgctgctgctgctgctgctgctgctgctgccgccgccgccgccgccgtccctgcgtccttcggtctctgctcccgggacccgggctccgccgcagccagccagcatgtcggggatcaagaagcaaaagacggtaggcttccaggcgccggcttccctccccgccaccgcactgcacgcgccgacccccaacccccaattccccggcacttgggtcccaccctccccgggagggggcgtggggaggaggagtaagagtggggcacggagggaagcaggagaaagaggctctgtgtggaattcccggggcagtcctcgccccgcagcccctctccacctcgcgactctgggaatctgcgctccttggggtcgccgcgcccgcgagagacctcccgagcttctcaagtgggtccggatctagatccaggaccagggacaggaaatcccctttctttcccaagagctcttccagacccgccttttcttctgtagggtctcggagcagatcgagctgactcccgttctgccaggtctggtcgctggggttttgtctatgggaacttccttggagtgggctttaatgacggactttcatagaggaaactgcaattatcaaagcaaactggaggaaattgcatttctacactggcgggatttagccctctagcttgatttcggcattgggtggcatctcgagttcagtaatgaggggtgagggtgcccctcggtttggtggagtaagatgaggggactgtgttgaggaggcacacttttacccagaattaataatctgagctgtcctcctttaatgggaaatatgagggcgtgtcaaagagaaaagtttctttcccagcaacatgggcacctataaattttgcattcttaaaaatggcagcagttctatttgtcaattataccccaataaactgaaaaaaaaaaaaaaaaaaaaaaaaaaaaaccgggagcagtaatcatagactcttagagttggatggcgccttctagacagcactggggccacgtcagatgtggtcagcaagccttgataaaatcctactcagcagtttggccgctgaacattctatcttcagccaccaccctgcaagcctcagatgattgtactggttactgaatgggttgacctctctctagtagatagacgtgcaatggacacatagtaggtgcctgataaatgtttattcttatataatgtgtattaccgaaatatctttgaggtgtatttgtggtgggccggggagaggtttaaaaaaaaaaacaaaatataaagccaagaagtggggaaggagtgtggaggggccatgcagggctagaagggtcatttgagcagcaagagaacagggtgggggctctgtggctccagggaccatactggaccagcaggagggtccagggtgtaggtggcatcaatttgggaagggacatttatcaaaatccagctgcctttctcaggagtaatttttaagtgggggactctcagcgttgtaacatatttttgaaataataaatgaaaatcacttgtattttgttcctatttaatgcgattaatttctgtaaaatcctaaatagtgtcttctaaatggcaagccgctgtgccagtagctttttatatcaatggggttttaattcccaccttcctgcttgcatcaagaattccttctcagttgtgatgggggactttgtcaagcattagaaagggacgaggtggtctctcctcttgatgcctccagtcggcaggagcccaggaagaggagggtttgagaacagggtcattacaaatcaattgcgggggctctgcacagtcagaagcagtgagaaatttgagggccggagggtttggtttttgtatttacacattctgaaccttctattttttgttaggtgggtgtatgtgtgtgtctgttttatacagcattaaattaactcctgaaacagctaactgaaatagaacttttctgaattttgatttagtctaacgcagttataacccaggcaccaacccaagttcccaaaagggctagataggtactatcggtactatttacagcaagccagctgtaaatgcatgtggaatctctcaagctttgaatgttcattcaaaatgtgttttgaaaccttgcaggccaaagcaaaatctgtccgcttgtgtgacctctgaactaatcaattatttgataagtattgctgacctcacaagctagcctaggagtgagactgagctgatcttttacggtcttataggaatcatcacattgtttactgcactgtcaacagaggacagttaattcacacagcagccactacagtaacttcaaatatttgttgagcacctactgtatgccaggtggtatactgggtgggggaggcggaaaaggagatacctcttttccaggtttttttggccacactctctggatgaatattgcctttcagttcagaccactctaggaagaggagatagttttggtttaaatgagagagtgtaggatgactttttcataagctttagaaaaaataaattaagtgttcttttataaaggaaggtagcacattccttctgttttatgcatctttaccatggaaaccaaagaaacagctaccagtcacattcatcccttcatcatttccacccctcacttacctccaaccctggctaccctcccacccccaccccctatacacacacatagacacctaggagagggaaagggacagactgcctctaggggactggaaagaagggaaggcaaaggcctgggcctttcctcttacatcatttcctggattaacatttttcaaggcccacagacagtgctgttatgttctggagacacccaatctgaaaacattgactgagatattaagttatttccgaaggatcaaataggaaaacaattggaaaggagtgaaaagatactgaaaaccacagcgctctccatagatgtaagggattatcaaccttttccttatttattttctttctttctttttttttttgagacagagtctcactctgtcacccaggctggagtgcagtagcgtggcatgatctcagctcactgcaacctccgcctcccgggttcaagccattctcttgccccagcctcccaagtagctgggattacaggcaccaccatcatgccctgctaattaccttttccttattttcagaattgtgcacagtataacattatttttctagaagtagccactttttttttttttttttttttttgagatggagtctcgctctgtcacccaggctggagtgcagagaagcgatctcgtctcactgcaacctccgcctcccaagttcgagcaattctcctgcctcagcctcccgagtagctggcactactggtgtgtaccaccacgcccagctaatttttgtatttttagtagagacggggttttgccacgttggtcaggctggtctcgaactcctgacctcaggtgattcacccaccttgaccttccaaagtgctgggattgcaggcttgagccactgcccccagccagaagtaattacttttaaaactatataaagacactaccgaaggcaagacatgaattctagatgagcaactactggagggagggacaaaaagcatttcctagaggccagacactcagacatctcatccccacagtagctctcatctcaggaaacagctttgtcttcaggggaggagaaataccaggggcagggcactactgaaattcaggtctgtccagcttcaaaactcatgctcttgaccccctccgtacttctgtttcaggatgtaactgctctggcccaaagttttctcatctgtaaaatgtgggtaataataactttccccttacaattgtcgtgaaaagtaagtaactcctaaaaattgtcttgctcagtgccagacccagagttagtgcttcatatgcagtagctatttcatttgtattaaactatactgtcatggtttggcatacataaaaagaaaaaacagcacacatcatactgttttgaagactcagtaaatgacaacagccagaatatttttgttttgttttgagacaggctggagtgcagtgctgctataatgggtcactgcagtctcgacctcctgggctcaagtgatcctcctgcctcagcctcccaagtacctagtactacaggtgcacaccatcatgcctggctaacttttaaagtttttgttgttgttgttttggtagagatgaggtctcactctgttgctctggccagtcttgaactcctgagctgaagagatcctcctgccttggcctcccgaagtattaggattgcaggcttgagccactgtgcttggccagccagaatatttaataaggaaaaacaaatgcagaaatatagaggtgacaatttgaattcttattgtgataggctggatagaagacactggttgacctctggtagaggtaccagagtatcagtgagtttttgccaacaactttggccaagaaagataatccatgcatagagtaaatattggactaacttctctccacccttcctgtgccttcaactattcctatgtgcaccttaaaattagtgtttcccaattcatgccatcgccatttattagatcatctgtttggactttggtgcggttaaaagataaatgtggttaactcagttatatgtctctttgagatagttatctttgtcttttatcacttttctgttgatgcatgtggctctgtggtttgctgaggggataattaggcttacctctaacatggaacttttagggaattagagtctgggaaaggcatcaatgatgtcaatctcagtcctaggagatttctgtttatttcaaaatctatcactaaatagtaatgggcactcattagtctttgtgtttggaagtcttaggaaaatgcagaaactaaaggtaaataaacataaatataacactagttcaactgttctattagcccctaggtgatttgttcatatgacacttggaacagcttatatgcccagcacctgacagtgatcctggcacagattaggtgttcaatattcattgaataaatgaatgagtaaatggctagagaattcattagaggatgtatttgctcttaggatccacattttttcctagattcctcactctcccctcttctctttgtgtgcttggttatttttgactgggtatttgtcattactgctgaaaaattgcttgtagagattccttcaggcctaggatgaatgactttgttttcagagaggatttgcttttgtttctgccaggtgtctggccccactcctagcctaggactcctttaattgaatttaccacttttttttttttggagacagagtctcgcactgtcacccaggctggagtgcagtggcgtgatctcagctcactgcaagttccgccttccgggttcacgccattcttctgcctcagcctcccgagtagctggaactacaggtgcctgccaccacgcccggctaactttttgtatttttagtagagacggggtttcaccgcgttaaccaggatggttttgatctcctgacctcgtgatctgcccgcctcggcctcccaaagtgctgggattacaggcgtgagccaccgtgcccggcctgaatttaccactttttaaagacttaggtgatgtgaatttggattgctattttgcacatgagagccagcttgtgaatacaacttcccagggaccaccctccccttttatactcactttctatgccaagacaattgtccttgccgtctctctgagtgggaggtaggtttattctggttcacccttatttttagagtgtagggtttaggagcccagcttaacttgaggaagacctttttttcttttcacttgagtgggttctgggctttaatttctgttccacctctctcagtgaagctgtcaaaatcagttcatgtatgctcctctcagcaaatatgccccataaggataaaagtgcctctctgcttacttatctctttgagttcttgctttcttccagattttggcctagtagtttcttcctattttgtcagctatttgttgttttaatttttttttcttttttttttttttagatggagtcttgctctgtcacccaggctcaagtgctgttggcgtgatcttggctcattgcaacctccacctcccaagttcaagcgattctcacgcctcggcctccctagtagctggggttacaggtgtgcaccaccacacccggctaatttttgtatttttagttgagacgggttttcaccatgttggccagactggtcttgaactcctgacctcaagtgatctgtctgccttggcctcccagagtgctgggattacaggcatgagccaccatgctcatcctgttgttttaaatttgattattttatgttattactagcatttatagttattttcagtggaagcatcaatctgaataacctacccatcactgctggaaacagagacctctaccctttctagattcctgtgaatcattaacatctcctatcataccttaccagacctgtgtcgctgtcataaaaggagtactttttaaacatgaactctagtcagatagctagtcaaaaatctttgatttaatcctttttccctaggatgtgctacagtgtggagtggggagtgctcaccttgtcttggtggtctcttcctatgcagacatccttagagatgtgcattgtcctgtccaatccttagtgttggtccaatttcaagtgcgttcttgtctgaaaggccccttcaatttaaacaactctccttacttctttcatgctctcctgggtaccctgaggccgttttgttgctccagcacaactctgaggtcgtggggtatgaatttggtgggactagttaaggtccttgacatgtccccactactcccaggagtgtaggaactaggttcctactttgctgtgaccatgcagggacttggaggagctctgggggctgctgaaacccaccctcttttcctctgagatcagaagcacatccaatgccctctgctttcagagcccccagggctatttggcctccctcttccccaagctcagcaccaggggcaggacactactccctgtttcagactcagactggtacccaagcttgctttgcttctcttttaataaagattaaagctttcccaaaaggttaattggtttatcataagcattgaatttgttataaattttgtcttcttgttcctttttcctgtctttttgatcaccacatttttgaaaaatttacaataaattggctgggtgtggtggctcatgcctgtaatcccagcactttgagaggctgaggtgggcggatcacttgagcgcaggagtttgagaccagcctgggcaacatggcaaaaccttgtctctacaaaaatgcaaaaaattagccaagtgtggtggcgcgggcctgtagtcccagctatctaggaggctgaggtgggatcgccccagtactggaggtcaaggctgcagtcagccatgatcatgccactacactccagcctgggtgacagagtgagaccctctctcaaaaaacctcaacaaaacaaacaaacaataaattggtgcacaagatgaaaatattttttctctgtacaaaagagccactgtattaaaacttgaaatataagttgcctctgatgacacgtggtgtataaaatggattccatcagttgactgatgtgacttcctttaaaatcttatcagcatccctttctgcatttcaaatttactactgaagttgattttgctgtaattgatattgtgcaagcacgactgtaatataaacatgacaaactcaatctgtataccatcaaatattaacttttggcaataaatgcatatagcctgtgacaataaagattttttaaaacagttacataaatatattatgtcaaatgctgcatcattcatagtgataatttctctgctagtcaatatttggtttaaatgtctagttaacacctgctttatgttttattattgatttattatgaaaagtattgatttttatccaccaagcatctatatccagtctcataccacaattacttttttaaaacaattttatgttgggtgtgtgcttttaaagacatttgtagactttatggatttaaactacctggaagaaaatccgagattctatccctataaactttattcttctacaccctcctccagtcattattaatttatgaataattcatgccttcccaatttccagcaaagtaagcaactcaagcattagtgatgattttattttcatacatttgctagtgttaaaaacctgaattaactttttggccctctgctgggggtcccatgtgtattactttgtttccttaagctctctaaaatcctttcctttttcagttcctgtcaaaatcctcacgtatatatttgtttacctcactcactcaacaatatttattgaatgaccaaaccaggatctctatttgtcataattaacaatagctaccaaagccttatattctttaattatagtttttagtctattcactgtctttaagtctattctaaacacagcatttgccttttctaattgaagcactccacccgcacctttatattatcaacgttctgcccagtaagtcttgcagtggccttgagctaaaagcaataaaattcccaattgacttttcttacatttcctcattcatttttctactaagttgaacattatttactctatattaaggctgtctctactttaaaaatgtgtgtgtgtgtgtgtgtgtgtgtgtgtgtgtttaaaaataattctagtattttacttctggaaggaaaattaggaggtcacctttaagctctttatatgacagttgatatacagcgttaagagctgtgccaggatctatggccattctttggcttgactgggtggggatacttccactaagctagaactctgatcaccctaccacacgcttaccacttctctctttatcacgtgctctttgaaagtgaccctgcctattttctacagctttatttcctctttcattcaacaagaaatattttccataaacaaaacttcctcccagttggtttattacattctgacttagctttagcattttgttgtggcattctggggacagaaaatacagaccaaaaagcagtatttgaaagatgtaacttgaccgttttgaaatatttttgattggccggactgtttctctttagaaaattcaaccctttcccacctcactcagtcttccttaaaccttctcaagtggtttaattgttttattaaaaaaagggatgccattgattagatagcatgcaatgcagataaagttgtatttggtaaaggctggaccaagttcagttatacgccaaagcctcagttcagttttacctctaaatctatccatttccattgcttcctcagttcgcaaagtactatgaagtcgattacagtaaccatgtgtggtcttcccaggacctaaattgctgactcccaatagagagtgttttcctaaagtatatgagtaattatggctcttgggccattgggtcactagtacaacaatgttttgagtagttactaaaaaataaccaaatcataactaaaataatttttcatttgacctttaagttagccaacagaataagaagacatcaaataaagcctagacattaaaattccgattgtggaatgtgcgttatttatctgaagtttctttttttagagcatgtgttgttagaaaattcctactctgttgtattctgttcattgccacgatttattgagcactgacctgtaggttaactcattgactcttcaccatctcgcgaagcaagtttgtgaataaatagtccaaagggaactcatttaactgaaatgggtctttaaagagttacccaaaggagaagttagaatcttattagcttctctgtagttaataagatgtttatttcatagaggcaatgacacttcatgccatgtagccaacacagctagattaggtaactagtaatgtattactgcttcatttgtaaaatattctggcagctgtctactgctagtatctcaagataataataatgaattctattgagaagcattccccagcacttttattaaaaaagagtaagtggcataaattggcaaatacatgttaccctcactatcacacgcatttctttctttatggtaacataaggtgaataattggaaaataaattttatttgttctcagactcaacctgtatgggtaatagtttttattgcctagccttacggctatgtcagtattcagcaaacgtgaacagaataatttgtttccactagctgcaatacttgaaccaagttgtaatattaatatgatttgtagataataaaaaagaaagtagaacaccagtgcatttttcacataaaaatttgacccagttcaaggtcgacgcttaaggatgttgtcaaccgatcaatgaggagtgcctagaaatcatgggattgtaaaaggtatgttccttggtgtttggaagaaaaattagggagcgttgtctccttctaacacataggtaagggaagtccaagtttttcagcaatcctgggctagtgtttcagcgataggtactaggaaggttcatattcccattctcaggagatgattgcataaaaagatggagcacacacacacacacacacacacactcatgctgaggagagcagcattggctgggtgtatttcaggggatgaaattgaagtcttttactggagaggagctgcattatttaaataaaaagaatcatggtgactgcatagaagttgaatcacagaatttgtgtcttcacagtgggatacaaaattctgtctaaaggatgtgttgtctctgcacagttagtcacatttagggaatggaaaaatctgggtcatcaaaaatacccagtttcttccattttcttctcagtgttgaggctgtgactcaaaaagtctcttacacatcacactgtgttattaatccttgttgtcataataacatcccttgggattcaggaaggcaccttgtgtacccaacagggttccccaaatagaagaagggaacaagcatttatccagggactatccatacagtatcccatctcatcctcacaataacctatgaagtagttcttatccctgctttacagtagggaactctgagcttgtagagactaagtaacttgcctcaggatgcataaccctaagtggcagagctggaacacaagtgccatgttttcaatcattcttttttttttcttcagttaaaataacatataatggatactatgactgtgagaatgcaaaaggatcttttgattatttaaacatgcattttaattttgtctttgcagactaaaaggatgatgcaggcactttgaaagggatttccttaggggctttttgtaatgttgtgtaatctttagaagatgtagattttagcaaatgctgttaaaaggcaataaatgttagtttggatgaggctctgtggccagttttaggaacagtagtctttggaattgaacccaacatttcaccttaagaatacaaggcttcagtgttctagtgggtgaatgcatacactcaagaataagtgattttagaaataattgcagtgacttacacataactctacacccagccttgtccattatgtgagtgctgcacagtcgagcattcatgagttacaagttcccaaagccccacaggctatgggcctgttctctggatgtactagaggtttcatcagcatttccattgctcagcacagaatgttaatatttcgtggttcagggagattgttttatatacacagcctaataaccagaaccaattgagaaaaaaatataaagaaaatacagataggtagcaaagtacagcctacagtggaacaccaacagggctagtgttaggaggggcagctgagacctgggttgaacactgtaattgtgtggctttgagcatcttctgattgaagttacacatttcaggagactcaattttatgcacgtggtattgccataagggtaattgctacctccctgtattatagcggagttcctctgggcatgcataatacctttctttcatcatgctcatcaagacttattcatactttgttatcaattatcctagtagctctacatattaggtagttacaagtattacaaatcatagattaggccactaacataaagaaatgaggtaaattccctgcagtcttcttgtggggccatgtaacagtagagaccacttgagtttgccaagtttggtggccaagtcccatgttttgtctgagaacagacagaggctcagggatattgggatgatatttggtatgaagggtttcttatttggactgcaccaagttaactgtgtgctgtgaaacattatatggcttcattttcattgggagaactagtgatataaatgatgtaacgtgaactaagtgatttagctaattacacatatttttggatgcttctaaaaaactaatatgtgatccttggagtagaggaagttgtacattcaaggttttctaccctttttgtgtgtgtttattttaatgaggacaatgggaactacaccatttctttcctgctagttcatcctggattacctttttatatccattaaacatagaaattctgaagccatgtctgcctacatgtcatcctgattgcctttgtgtataattgcagatcaaatgtagaagcagtgactacttaaaaaaaaagttgttatagaccaaggcttgaggaaagagaaaggtacagtgacaatgagatatcttgggggaaatttggtcccgtagaccaggggttagcaaatcatatcctgtgggccaaaccacagtcacctgcctgttttggtaggcctataagctaggaatggtttttacatttttttaaaagactgatggggagaagtgaaaggaaaaattatattttgtgttatgaaaagtatatgaaattaaaattttagtgtctataaataaagctttcgaaacgtaccatgcttattcgtttacacattgtggcttcttttacagcaaggatgggtatttctgtgtggcctgaaaggctgagaatgtgtactgtctgatcctttaagaaaaatttgccacctcctgttatatatagtgggggccagtgttcagttggaagatgcttaggcccatggcctgtcagcgtgtaactctatgtgtctgaattcagagagctgagtactagctgtacttcatgagccccattgaattgtgtttgttgtattgtcattgttttgttaaaacattatttttttaaagttctgtggaacactagtgtgtctactgtaatgatattattcagattatttattaattagaacattccctttataaatatctctggaattttctttgtttttgtttttgtagagatgggtctccctatgttgcccaggctggtcttgtactcctggcctcaagcgatcctcccaccttgccctcctaaagtgctggggattgcaggtgtgagccactgtgccagcctgggattttcttcatattctctttataaaaattcatagagagacatttctgtctagttttactaccagaagggttatatttttcttagctgtgtgtgtgtttgtgtgtgtatgtattcatgtgtgtgtgtgtgtgtgtgtgtgtctaattcctttgcgaattttgggaccatccaggttttccccctcaagatgcctgccagaaagctcagaagtgaatttttggcttactttttttttttttttttttttttttgcaccagctttatgcttggtaccacttcgttttatgcccctgggttgttctttcctttttcttgtccacttctgattcatgagtttttgctatgctttatgaatcttctaagtcactgaatacttttaggaactctacagaacattaaaatataaaattaatagtaagacatatctgaatttttgttctagaaggtcccagagctctcctttaccattctacctcagagagcccttttccttctgcatgttatcttgggactgtccagggctctatgcctgcagggcctagagccagtccatgaagtgctcattgagtgctttgtggtctaatgttctacccttcctgcaagcttacaaatcaaccccttcaagactgataaagacagagcagaggttctttagtatctagagtccccagaagtcaggaaggttgtgaacttggatgggtaaaaaaaatttctgttttgagatgaagtcttgctctgtctcccaggctggagtgcagtggcacgatctcggctcactgcaacctccacctcctgtgtccaagcgattctcctgcctcagctctctgagtagctgggattacaggcacgtgccaccacacccggctaattttttatatttttggtagagatgggttttcaccatgttggccaggctggtcttgaactcctggcctcaggtgatcctcctgcctaggcctcccaaagtgctgggattacagatatgagccactgctcccagcagtaattttttttttataacttgtaacagaaatttggcattttcttcaattatgaagacaggcaacaaaccacagcaatattagcaatacttgtgactatgtcaccagtagaaaccacagatactttaatatcagattatatcgttgcagatattgcaaaatatctgtgctttttataactagaaaattaagatctataaaaagatctataaaagagttataaaaatacttcaaaattaagattataactgtctacctagacagatagttcttgttatttaatacattgctaaagaagcatatttattaccgtgctataatttttaaaaagcattttgttaccgtaattctttttcttttattggcaatcctttgtgttttatgcatttaaaaacacttttctgagaggggatccataggcgaccataggggtttttgactccaaaaagggtaagaaacctccatgcatgggtgtgcccacatgcatgtatgcacacacagacacagatacacaatttttacatatggtttcaaggagttacagactcctcttacaagacccatatctaggaactgcagtttaagatcttatgccctgttggctaaaattcaaaatagcaggccctaagagggacggcctttattttgtctttttaaaacactattcaaatgaatcttttctagtaatgacttacaacaccctcttagtcatagcattagcactggctgttatcatttagtattacctctttcttctataaaacaaggaatgtgtatgtagttatgaaatcattctcttggtttataccatatcaactagatatttgtcagtgaaaaattgaaaatctacctcttcaccctctttgaattgtagtttgcattaaaaagattcgcatatttgaattttcaaaacttggtatgtgtgtattttgtaagtttggaattggataaaaattacaaatattataataagttaatgacataatcccttttgtattcttctgtgtcttgagtggttttgttgctgtaagtcaagcacatttattattcatgtatggggggccaagtttcatctgagaatgtaatttcatgctaataggttgcgttgtaagtccctggttaggatttacttatacctgcatgggttttatgcttccctgtgttccattcattacgctgctattctgaatgcatctcctaatttagtgagatctgagagccaccttagagattacgtagtccagtttttctccaccctgctaagcttcacaaaatattaatgcctggacctcactcctagtgaatatgattgaatggatctgtgttggggaatggaggcagtcttcaaaaactggctacaaggtttcttggttcagccaggcttgagaacctcagcctagcctaattccttccccatgcaaatgaaagcattgtaacatgcctgagggccaccggctcagatgagttttctctacttcagaaagctattttccctttccagatttctttctttttttttttttttttaatgtaaagccatttcccagccagtgcagtcttctgtggtcactacattcctcatggaatatttaaaattatttaaaattaaatattccatgaggaatgtagctggaacgtttaaaagcttactatccttgtcctgttttaccgttacctaatgggaagacagctttctggaaaaacctgaagaccattctttcttagtgagctgttcttgacggtggtgactttatctttggaaatttgcccgattcccatatcacaattaaggaagtggcttaagaaagtagcttgtaattctctagagtgtaagtctccagatctcactgttgaactttgtatgttccagtaggactaaatctaaaataatttccttgtcacatttgatagacatgagtattagggacccacattggaagaaccctccaaaaacggacctgtctttcctttgtgagttttcagtgtaattctagcatttctgggagaaatatgtaagtacctcaagggcagaaatcctgcccacttaaatgtttcataattatcacctaaaacttagaatggatcaaattaactaattagctttgtaccttttcaacacaagctaatagattgcctgacttcgtttatctgatcatgaattttgatcaactttatctcattaggtttaaaaattaatatgttgcgttatatagcacttatctttacagagattattcatcttcaatgcaataaataaaagaaaagccaagccaggtgtgatggcacatgcctgtagacacagctacttggcaggctgaggtgggaggatcacttgagcccagcggttccaggcctgcagtaagcccagattgtgccactgtactccagtctggatgacagaatgagaccctgtctcaaaaaaaaaaaaaaaaaaaaaaaaaaaggccggatgcagtggctcatgcctataatcccagcactttgggaggccgaggcaggcagatcacttgaggtcaggagttcgagaccaacttggacaacatgatgaaaccccatctctactaaaaataaaaaaattagccgggcatggcagcacactcctgtaatcccagctactccagagattggggcaggaaaattgcttgaacccgggaggcagaggctgcagtgagctgagatcacgccactacactccagcctgggcaacagagcgagactccatctcaaaaaataagataaaatgaaaagacagatatttaatgcagatatctaagctttaaaagattggatgactcaagccaatggcaattctttttttctgatttacagttgtgtttttttaaagatggcaactttgttttactttcttcttccttctatattattttgaagtgaatttgactacaaatattttgaaaaatatatgcccctatgtattgaatctaaaaagcaattacaatttgtccttttcctctaattctcttatgcaactatcagaatggaaaataaatttcaggatacttttggatcaaaaatgacagaaatcaaattgcttgacatctagtaaccagagtggacatgaaagaggagtcaattctacagcaagccctgtaaccagctccgtgcaggagaaacatggagaattaagacaatcacctccctctaagaagctttgtgtgcttttcccagatcttcattttcataggcagtatgatttcaaaatgttgtccagtaaaaactctttatcaagttataactggaaagctacccactatctctttatataatgacagcatccactatgtaagatttatattacatgcatgcgtgtggaatgtactttgaaccactctctaactatgatcataggtcagtacctgccagagaatggagatttttaaaaattgtgatcacagatttgagaatataatctttttaaaaaagatatgcttagccttgtaaataaagataagcattttaagaatttattttataaagaaaaggtttgatggagcaaagatttaagcattgagaaacccatagacctacaagaaaaaaacatgaatcttatataatcacagaatggggaagaccacttctaagtataatacacattcagatactataaatttttttgaatataaaaacttttttttcccagaaataaatctgcatctttatagccaactgattttctacaaaggcgccaagactatacactggggaaaggataccctcttcaataaatggtgctgggaaaattgacgatccatacacagaagattgaaactggacccctgtctctcaccatatacaaaaatcaaccgaagatggattaaagatgtgaatataagaccccaaactttaaaactactagaagaaaacacagggaaaacacttcaagatattggtctaggcaaatattttatggttaagaccttaaaagcatagacacctaaaacgaaaatagacaaattgaactatattaaactaaaaagcttctgcacaacaaaggaaacaatcaacagcatgaagaggcaacctgttgaatgagagaaaatattgcatactatcttctgacaagggactaatatccagactatatcagaaacccagcagcgtaaaaaaaaaattccattaaaaagtgggcaaaggacatgaatagacaattctcaaaagaagacatgtaaatggccaacagatatgtgaaaaaatgctccacatcactaattgtcaggaaaattcaaatcaaaaccatgagatattacctcacctcatgtagaagggctaatatgtaaaaagacaaaaaaaaagtaatactggtgaggatgtggaaaaaagggaattcatacactgttggtgggaatgtaaattagtaaagccactgtggaaaacaaatggagatttctcaaaaaactaaaaacagaactatgatacagtccatcagttccactacgggtatctattcaaaggaaaagcaatcagtatatcaaagagatacctacatttacatgtttattgtagcactattcataataggaaagacatggaataaacccaggtgtccatcaacaggcaaatggataaagaaaatgtggtatatgtttacaatggaatactattcagccataaaaaagaatgaaatcatgtcatttgcagcaacatggatgcaactggagatcattatattaaatgatataatccaggcacagaaggacaaacattgcgtgttttcactcatatgcagaagctagaaaacttgatatcatcaaggtagagagtagaatgatacatactagaggccgggaaaattggttagggtggggagatgaacaaagataggttaacaggtacagatacaattagataaaagttataataagttctatcgttctacagcagagcagagtgactatagttagcaacaatgtattgtatatttcaaagtagctggaagtgaggactggaattgttctcaacacataaaaataataaatgcacaaagtgatagactcttcaaataccctgacttaatcattacacattctatgcatgtaacaaactaccacatgcaccctgtaagtatgtaaaatataatatatcaataaaaagccaaatattttaaaaattacatgccaattttttttatgtgtgttaaaacaaaagtcaaaagacaagcgaaaacctaggggataatttgtaactcataggagacataggactgttttccaaaatatatagaactcctataaatcaatatttttaaaaatcagcaggtctgacacagtggctcatgtctgtaatcccggcacttcaggaggctgagacaggtagattgcttgagtccaggggttcgagaccagcctgggcaacatgacaaaaccccatctctacaaaaaatacaaaaattagccaggtatggtggtgcgtgcctgtagtcccaggtacttgggaggctgaggtgggagtatcgcttgagactcgaaggtcaaggctgcagtgagccaccatgatcgtgccactgcgctccagcctgagcaacagtgagaacctatctcaaaaaaaaaaaaaaaaagtcactctcatcacagtctccactgttgtaatggtccactgtctgcaaggacaagttattgatcaggaggatttccaaccaagagcgagaacccaaacaaattagcacaactcatcttctgcttctgtaacaaacaagttgtccagttgtcactttgggcactaaagagggacttactctcagatttgggaactagacccgttactattttctttagcactggagggagccttcctttatttggtctcactctaagttggtttcacactgaagtcaattttaagtctgtgctttgcaagtatgaattgaaaatggtggtgtggggtgctttcttggctttggcacctggataacaaagttccccaggaacaagctttcattcatcaatggaatacactggatttctgtcttacagttcagggtgggccagaaggagccatggtgggtctgtagagggatgaattagcatcctgttagaaaggtgctgggtccctcctcagtcactttgaatgctccctgtttttgcagcagtcatgacccatatttttaaacttttaaagtataaagtccatacagaaaaatatataaattttcagtgtgctactcaatgaatttgtgtgatggtatttcaggtagtattctgttttctaatctgtgtactggaacacactttcataactggcacacagattaggaaacagaatactacctgaatcccacaaatgccttccagtcactacctccttctcctcggtaaccatcctgactaatcttgccggtttttgagcttttagaaatggaattctacgttatacaatcttttgtgtttggtttcttttgctccgagatgtatttgtgagagtcattcatattgtttgtgtgcaattggaatttgttcattctcactgctatatagtgtattccactgctggaataattaaatatgtgtttctcaactgggggtgattttgccctttgagggacattgagcaatgtctggagatctttttctagttgttacaactcacagtaagggaagcgggtgttgctgctattatcctacaatgcacaggaccacaggacagccctccaacacaaagaattctcaggttcaagacatcaatagtgccaaggttgagaaaccctgctgtacatagcgttggatcgtgtgaatataccaccatttatttctctgtgtatttcttagagcctcaacttgagcattcatgagcataatgcagctcagccctggctttgaagttcttgaaaccatgcttaccaccatcagaataaaaagactatcaaacaggaggagttttaaatgtttacaataactgttagagtcaaaatacactgtcatgtatagccttggtcatagacaaaaattgtacattttggaactactacaagaatttgaagaggttttaagtgagaaagtgaaatgggctaagtcaaggttttcatcaaagaatgaaaagacttttcttagaaacagctttattgagaaataatttatatactataaaattcacccattttaactgtacagtttaaagattcctagaaaatttacagagttgtacaaccatgatcacactctaattttagaacattttcattacgctaaaaagatccctggtgcccattcgcagtcattcccattcctactccaagttccgagaagctaccagtctactttctgtctcctgatagtttccttttttggatgtttcttataaatggaatgataaaatatgtggtcttttgtgactggcttctttcacttagcataatgttttaagattcattcatgttgctgcaggtatcagtacttcatactttttatggctgaatacgattccattgtgtgggtataccacattttttatccattaacaggttgatggacatttgggttgcttacagtttggggctattatgaagaatggacatgaagaatttttgaagcgtggctagataaatggttagcacaagtaggcttttgaagaagggacatgattctgggccagatgacttattttgtttagaggaataatttgagtgattgaaaaaatagaatacgaagggaaaaggacaagaatggcacaagaagtattagacttacagggaaaggagatctctgacatttacccatacagaccctagtatttcaaaggcattgtatagccatgccggctaggctatagagcagcaaaggtctacagaggagcaaagggtaacatcccactctcttccccagtcttgcaggcacaaacgcagttggcatagccttgaggctgatttttccagatgaaccaggaagacccttggtttttggcagatttaataaccaacattcaaacaaggcactttaaaaaatctacaattcgagaggatttcctggcactatataaaaccccttccatcaatgggagttgttctcccttcttgaattggagtgttcattaagtccataaaatggaaagcacatgtaggataataacacagatattttgtgttagagaaaagttatgaagcatggcatcgaaagaggttagaaaaaaaaaattcactaaaaacaatcatgaaatggtaaagaaaattcccatcctcaacccatctgcatcaaatgaagatgctgctgacagtagatattaaaagagatgttgaacacataaggtccaggtggccgcaatgctttccttttatcccttcctacatagatagatggaagggactcggcacaataaaaagaaggagcatgtagaaaaacatgggcgatttgagaccttccaaggcagagcaggccagtaaaggtgaagcagctggaagccttttttctccaccaggaaaggaggatagagagcaagggaggttttaagtgggagatgctgcgcgtgctttccccataaattctgagggcagtgcacagtattccaagttgtgtagcttctcacatgcaagctaggcccagaaccacttgagttcacaactatttctttctttttctttttcttttttttctttttttcttttcctttttcttttttcttttttttttttttgagacagagtcttggtttgtcccctaggcactggagtgcagtggcatgatctcagcttaccaccatctccctctcccgggttcaagcaattctcctgcctcagcctcctgagtagctgggactgcaggtgtgcaccacctcacccagtgaatttttgtatttttagtagagacggggtttcaccatgttcgccaggctggtcttgaactcctgacctcaggtgatccacccacctcaggtgatccgcccacctcagcctcccaaagtgttaggattacaggcgtgagccaccgtgcctggcccacagctatttcttgaaaatgagttcaacaatgtggaccttctgtgtgtgcaagggaatatgccttatattcatcctctattctatcacctgacaagaacgaaacagagttcaatggtctaaatttgcattcacgtgcagggctcctagaaatgatgatcctgcataattgttgtggaaatcatttgtcttctattggattcatgaaggcttaaacacatggtcaggggatcagactcactaatagctcttttatgtttcttccacttattgagataaaatctttttttttttttttgaaacaaggtttcactctgtcacccaggctggaatacagtggtgtgatgatggcttgctgcagcctcaacctcctaggttcaagtgatcctctggcctcagcctccagagtagttgggaccacaggtgcaaaccaccacacacacttggctaatttttaaaatttttgtggagatgggggtttcgctatgttgcccaagctggtcttgaactcctggcttcaagcgatcctcccaccttggcctcccaaaatgcttggattacagaagcgtgccaccacacctggcctcagatgaaatatcctgcatttactccatactagagaaaaatagagacgtgacatgtagcctgcatagcttttttgaattcttttacaatcactctgtaccagtacgtgttgtcaacaaaatgcagcaaaataaagagttgcatgataattttaatgcatgaccaatgaagattgaagccagcctgttgggttaatcctgttttgtttcaatcctagtctttcccctcaggagctaggtttttggctggactgactggataattgttgcaggaatctctttccatcttcatgtatgaaagcagtgatggggtatgtgattaaaccatgttagacaatatgattaggccatgccattattctttcacagttgcaaaggtaagctatatttctcaggctgtcatccccacagctaatgctttgtgtaagtcttcagggagcagctcacatgtgctgatgacaagttcagttcacagtgtgacttgtccaacacaggatgtctgccgtgtctttgaacgctatagattatttgctttgctggtttttgtgttttaaatacgtggaaccgtacaatgtgtactcttctgtgtttgtaagatgcatccttagtgttgtgcgtagctgtcctttgttcattctcattgccgtgtggtattccattgtgtaaagacatcacaatttatttacccagactaccactgatgggcagttgggtgtctcaatatttatagcaactgtgtgaggtaggtgctattattccatccattttgctgacggggagattgaagctacgagtggctttagaattgattacctcaagtcacacaggtcatttcgtggttgagccagaccttgagccaaggtagcccaggctccctaccctcacccttttatgcctcagtgtctgactgagctatttagtgaagcacttctttgatctgtctctgtctttcttttctccctctaaaggactgcctctgaaggaaaaatccaggtcaccaggctacacagggactcatctctacccctgggactaaagcttggctctcagatccagttttctgagcttagggtagggctatccccagtgaccccattcattcacctgccatgtctgaatccatgggaaatcctttgtaggctcaagctgagccccccacttcaaaagcatatttaaaagccaaattaaccccagagaggagagttgagcttgtctctgtgttggtatatttttggctttaactgttcaggctctactcttttcaagcagagtatgaggaaacctgaggactacatttttgttttgttttgcttttcctgtattagaatttttattttctgtatggagtcttctctttaatgtttgtaggaaaagaactgccaactcatattttatgttttttagaaaattgtcaggctgagtgcagtggctcatgcctgcaatcctggcacttacggaggacaaggcggcttgagcctgggagtttgagaccagcctgtgcaacatagcaagacctcatccttacaaaaaaataaaaacattagctgggcatgatgatgtatacctgcagtctcagctactcgggaagctggtggtgggaggatcgcttgagcctgggaggttgaggctacagtgagccacaattgtaccactgcactccagcttgagtgacagagtgagaccctgtctcaaaaaaaattttattttttcacaatgcatgtttctttctgttgtttccacagaaacattcaggtagaggctacagatttacatgaaaaggaaagatcagtttcctagccttgtgtcaggagcccatgtgaggccagttcttggcttctccttggctggaaataggagggtacaaatagggtcacctactctcaaattctgcggttcaaattgtggttggagatgagatgttctatttctgcatctctcctggaccatcttagagcagtgcaaagtttactggatcttccagtgcattattggcctttggtgtgatgacgagagagcaggaaggaggtctccagctccttttctgagttcagatgttccctagcccaagaagactaatcatgcacctggtttcctgctctgaaaaataagaagtgattttggcagcctttgaatctggatggaaggtggttttttttttttttcagtaacaaaggtagttgtgtatgtatgtacagagatagattaaaacaattttttttcctagaagcattttacaaaagttaagtgtgcaagctatcctgtcgaactttgtccttttttttctagacactcctttacactgtggaatctgtgagtagtgccagccaggaggagagtggcaactttccaaaaaaaaaaaaaaaaaaagaggcccttttacccattggttaatagagggggagggtgcagctatttaggaacatctgaatcctgtcattctggagtctggaatccccttctcttccccctccaaggtcttcgtatagctcacctcacacccagtacacacacccgctcctgggatactgtatcctattcagccacctcctagccagtggaccacctcataactaatgtcaaggttatgtgtaaaatctgaatgtgcttagatcttgataggaaaattatctaaactttgaaaaattgctatgtctacaatttcagaactggttgtcgactcatgagacgacacttactgttgtcccgtgatttaattgtttttaccaactaacaatttggaaccaaggcttttaaaccatcccttctgattaacgtcagagaagaggggcattcctttgaaaagaattcctaaacagaatttttataaatggagtacaaaatagcacgaggaacagtgagaaacatcttcaggattcccatggcctaggcatggaataaatgcaaggttagggcttattttctgagaaataaacccttagtaggatgctagataaaacacaggacatccagctaaatttgaacttcagacaaacaagaaatacttttttgatataagtatgtctcaaatattgcatggggcatcctatgtttttatttgttaaatctggtcattttaactaggtttgcaatatattttcagcacaatttcaacagttcatatttgctgagtactttgggcatgatggttagagtcagaggtgactttaggagctgcaggccttgtgtgtgtccctttcaccactatccccacagccccaagtacaatctttggcatatagttgagctcaataaatatattttgaaaaaattaatcaaaatgataaaataagtatggactatgactaactgatgatgcttatgacgtaggtgggaatacaggctcctatattaaaaaagttattgtggctaatactatcttattttggattttaactggttaatttgcttaatagactagcccacttggttgaaggattcaaattctaaatatacgaaaggttatttccatttcaaaaagtgatgcagaaagacaaatagcatgttctctcactcatatgtggattctaaagatgaccgcatagaaatagagagtagaatagtggttaccagaggctggtaacgatagaagggaagggaggatgaatacagttacataggaggaataagtcctggtgttccattgcacagtgaagtgcctatagtagctagaagagaggatgttgaatgttctcagcatgaagaaatgataagtgtttgaggtgatggaatgcttaccctgatttcatcattacacaaggtatacatgtatcgaaatatcaccttgtacttcatatatatgtacagttatgtctcaattaaaaatttaaaaaactcttaaaaagaaaaaagaatcaagagagaagaatacaaaaaatgatgattaagtggaaattaaaccatagttttatctggatttgatgtaattttttaaatgatttgatttagactgtgctattggacaatgccacctattttctttcatatacacttttattctaatgttctaatcaattaagtcctgtatatttaatattcatttctgtcagggttgaatttgatccaggagaaatggatgtgtactaactagtcaggtgtaactggaatcttactataaagtaaaaattattgtaggccttctaaggaatttataattcattaaaatacatataataacactaaaaagctaattaatatataatattctagttaaaaattaggcatatatgactatatgcaatagtgtggaaaacaattaggcatggaaattattgttagagtttattatttttcaaaagataatgataaaacacacctgtaaatttaatataattataaattcgtcaaatctcaggatggtaaaaccttaaatataccatttgtaactgacattatgtattctctttcttcttcagaggaaaaccctgaagaactatggaaatttcttttttattttatttatttatttatttatttatttatttattgagactaagtctcactctgtcacccaggctggagtgcagtggtgggatctctgctcacctcaagctccgccccccgggttcatgccgttctcctgcctcagcctccccagtagctgggactacaggcgcccgccaccacgcctggctaatttttttgtatttttagtagagacggggtttcactgtgttagccatggtctcgatctcctgacctcatgatcctcccgcctcggcctcccaaagtgctgggattacaggcgtgagccaccaaggccggcagaactatggaaatttctaagaaacaaaaacccaaacagtccttcttattcagacttctttgtaaaaccgaccaaaataactctctctttttcttaattgcttgaagtgatactcacattcagttccactagttgtctctaagcagtggtataaccagaataattggagtcccacctgaaagaaaagatggataaatttaactaccttaaaaaaaaaaactgtatggaaagcaactccataaacaagtcagaaacaacattattcacaaagttaaggaataaagaaccaggggtcagggccggggccagttgcggtggctcacgcctgtaatcccagcactttgggagtccaaggcgggtggattacctgaggtcgggagttggagatcagcctgaccaacatggagaaaccccgtccccactaaaaatacaaaattagccgggcatggtggcacatgcctgcaatcctagctactcgggaggctgaggcaggagaattgcttgaaactgggaggcagaggttgtggtgagccgagatcatgccactgcaccccagcctaggcaacacgagcaaaactccatctcaaaaaaaaaaaaaaacaaaaaaaacccacaaagaacttgtggcctgggggacaggcgcagtggcccaggcctgtaatcccagcactttgggaggccgaggcaggtggatcacctgaagtcaggagttcgagaccagcctaacatggtgaaaccccgtctctactaaatacaaaaaattagccaggcgtggtggcgcatgcctataatcccagctacttgggaggctgaggcaggagaatcgcttgaacctgggaggtggaggtttgcggtgagccgagatcgtgccattgcactccagcctgggcaacaagagcgaaaccttgtctcaaaaaaaaaaaaaaagaaaaaaaaaaagaactgggaagattacataatatcttcagggctcctgcaaattataagaaaagaccaataatggaatagaacaaggggtaaagagtatgaatgagagtccaaaaaagaaaaaggaaaaaatacaaacagtcgtagacataataaaaggtgtaaggtgtacaatatagcttataatagaaatttaaactaaaatcacattgaaataccattgttcattcatcagattggtagaaatccaaaagtcttgatatactctgtggcaatgctgttgggaactgaaactcccatccatcgctggtaggagtatagattggtgtaatattctataatggacaatttagttatatctattgatatgacagatgttcatactgattgacctagtaatccacgtctagcaattaatcccacagatatattttcacatgcaaaaaattaagtataaggttattaattattgcaatgtttgtaataataaaagactggaaatcatccaagtattcatcaaaaaagagctagttaaatatatattcatacaccggaacattatgcaagggtaaaatgaatgagaaaaccctctgtactgatgtggaaagatttgccaagacagatctgaaaaaggtgtgtaatagtgtggaaaggaggattaagcaaataaatgcctattttaaaatttatgcataaaaaactgacagagcatgtaaggaacgaatagaaatgaccatctacttttagaagtgaggaggagggaggctagagagatgggggcggaggcagaagtggcagcatggcttctgcatacctgcttgtgtatatatcttttcagtttttgagccatgtggatgtgacttatgcaataattaaataattaagaagaatatagcatgagctaggtccagaagccagagagaacagggatatctgggggaatttcaggggttagattgataggtgtgcagaatgtgaaggtggagtggtaagagatgagatgaaaagacccattttaattatcattaaaaacaactatttttctttttctaacatttattgagagcttaactaagagccagaccctgtgcttttatgtacatttcctcatttaatcctcataacagttcagtaaggctgcagctgttattacaatcattttataagtgaaggaacagagaggttaagtaatttacttaagggcatacagcagttggccactggtggaatcagtatgcacaacccatcatgaccctgtgttcatgctcttaacttttgtaccattctgcttgttcaagggaacatacatccaactgagggaggtggggtgaggggcaagagtttctatctttctacacagtgaattttattaattctgtagagctcatcttacagtactaccaagtatggctgcccccaaatctgtgactcagccaagattatttttaaatatttcccattcttatgacctatccaccactttggcacctatcctcttccaagactatctcagcatctggctcgctacctttgaccataacaaacatttgaataacaaaccaagtttatgaagtatcatgggcatgacaaattagtttaagaaacattcattcagtaaattttgaacccccatagtattccaggcatacagattcaaagataaacgtgagcaaagcagcctctctggtgttcccatctggtgaagaaggccgacatgtcagcaaaaatccatatttaacctacgttctcttatattggttagtgttacctagatttgcctaagcattaaaatcacttgagacacttaaaaaaaaaaaaaggcaacaacataaaaaccctagtttcttgggccctaccgccgaccacttgaatgagaatttcctggggatggtcctgggaatgtgtatttttaacaagtgcccatgagagtcttaaattaggtaagtttgggaaatgagatatcagtagaaacaggatactgtggggtcagaggaggaagttgctcagtctgtctgtaggtgggaagattagccaaagcctcacagcaatgtttaggccacaccttaatgagtgagtaagcacccaaggagaaaggactttccaagcaaggagaattttaaaaattagccaggtatggtcggtgcacacctgtagtcacagctacttggaaggctgaggtgggaagatcacttgagttcagtgagccatgaacatgccactgcactgcagcctgtgtgacagagtaagcaagaccctgtctctaaaaaaaataaaattaaagggaattttactctactggcaaagaagagaatggcttcatggaagagagggagtccagttcaaaggctgtcaggaagacttctgggagcaattagctaactaacagtgatggaatggcgtttagctgaaatttgcaagacttgatagattaatttttttaatgaaggagacaagcaataggatggctcctagcttacaaaatggggagaagtgtgggtcatcgctagtggtgaggaatatgggaaaaggagcaaagggtgatgataggaagatgaattccatcttgatcctgctgagtttcagtggctctggggggaatcatacctactaggcatttggatatctgaagatagagatttgggagcccgcagcatatggatggtagacaaagccttggaagcaggtacaaatcactgaggggtgtagggaggaagagtagaagagtgctgaaggcagagctatggatccctgaccctaaagagagatggaggaagagaggaatatggcaaggagtctatggaagagcgatgagaagacagaaaagctctgagagagaacattatcttggaagctgaagagagagttttccagaaaaagagtggtcaatgggaagaaatggaagagagatgctgttttagagattattggctgcttgttgtttctgcttctaatgccttggtttgccaaatccagtccagattctacatgaatctccagttaaatggtcaaccatataactgacaggttgtctgattttatacagcttaaattcctaagagaatctaatgggttcatcctgtgtgttgatttcacttgggtcaacctagtgcaataagccattttatagggagggtagcccgcgaggttgagtctgtagctgtggctgagcagatcactgagtgtgcaggggaaagaggataaacactgaagatcttgccaataatcatcataacaacccccaatgttgattaggcactgttttaaacaccttacacgtggtaattcatttaatctgtttgaatataatggtgagcatggaagtcatattacagtgaattgagtcctctactactaataatgacagtaagtctctagaaaggcgttaatctgactcttccaaaaatgccctttgctttgctctcccttaaaagggcagaatccttccctgggtccacttttgatgactgggtgggagactgtgccttctgatcaagtttcctgagttcttttaatggaatcatcagaatatcacacataaaatgaggccttgagccaggctggcatggccacactgaagtcctgtgattctgtttacctgagagcatgatgagtttattggtctttcttagccttaggaatctgcctttccagtgcatggtgtttagacagagtagcagctgaatgaattttgaatttaattgttccccagcagagagtgaacaacctttgcatatgccagctttttgtgtagacttttcagaatggtgatttcaggtcatttccaaccgaaggactctttcagttcataataacacatattttaattagctatctttggattgttcatatttgtggaggaagaagcagtggaataacctacttgagaatgtgctcagagcatgtggctcgtttgacatacaaaagcactgtattaaataagtgtccagttcggtcgtttatttagatttagttgataacttggatttcagcactaactgaaatgcattggttcacattagcttaatcaattctcatagaatatggagagctcaccagaactataattacaacagcacataattatttgatgctgatttcaaaggatattttacaaatgcatttgtgaatggtagttcgttcttttaaacgtttggactgctttggctttttctgtggtggggcctagaagaagacaggtcacagcaggtctcacttgaagaaatctttaacacagaacataaaagtgactgtaactaaagtttggaacatgtcattttactgagtactgacactagaggagtttgtttaaggatattcacatcagttaacaaatcaacgaaacgtttattaaacttctgttactcattcaacaaatatgtaatgaatacctactataagtccaagtattccacatcatctcttttcatccttgcaaacattagcaggaactataatcccacaattttatgagatgtagagaggtcaggcttagcttgctcaaggttctagtggaggcagaatttgaactgcttccaaactgtccaacattaaaatctatattacttcctcttagctggatcttatcaggaaatcaaagctgtataagctatggccccttctgtgtggggttgacaatgacatctaaaacatcagacttaagtctataaatctagaaaacataaggcataagtctacaccacccaggcaaagtgccacaggatctcatagctacaggagtttaggaaagaagcatcaaggaaggcagccagcacccatggggtttgtgctgcttggagaacaggtggtatgtggatagttgagggcatggagagatgattccagtgggaagagctgaatgagaaaaggtgcaaaaccagaatgaccaagctgtgtccaggaaatcataaacagacctgctgctgagaacaaaagttctgttatctgagagtagaaaatatggctgaaaggtaaatggaaccggcttagcggagggccttaagttccaagctaaggattaggactttgttctgtggtttataggaagtgattacaagttttggatataaaagtaacatgatttaagggtgttttagaaaattaacctgattgtcaactggaaaaagaggtgatagagctggaaatcagtaaaggggctctgggccaggcagggaaatgatgtgatggctgctttacaaccttgaggaaactcagaaggagtagggttcatgggggactgtgttcaggaacaggtccaaaaagttaggccaggccaagggggatatttacgcacagcaatggagggcagggtagctagaaggaaagcatagtcacaaagagaggcaaaggccagggctggagaatcagttcatagcatcaggagggtctaaggagtgaaatgcaacgatgtcttagtccatgcaggctgctatcacaaaataccataccctggtggcttataaaaaacaaagttatttcttgcaggtctggaggctgagaagtccaagagcaaggaacttacagattcagtgtctggtgagggctgccttcttgctataagctcacatggaggaaaaacggccaggtggctctgtggggcctcttcataagagcactaattccattcatcagggctcctccctcatgatctaattacctgccaaaggcccaacccaatcctatcacattaggcattatgtttttcacaagcgaatataaagggcaaagggaacaaaaaataattagaccatagcagcctgtacataaaaaatgagcaggttagggggcaaaaggcaaggggaggacccgcaacaagttctgctacagaatgtgacacaaactgaggcacccgggtcaggaccaaggctgaacatcatttggcagccagcttactgcctactgtgggataagcctgaaggttgaagtggaagtcacaggaaccaagacatgaagggtctaagtcagaatgctgacagtggaaattgcaagaaagttcttatgtgatagagatcatgaagaaagactcaacaggatgtgcggatacataattagatcaatgatacataattagagaggaaggagagcagtaggtcctataagccctcgtcgtcattttaaaagcaagccatgttccaagggtaaatttggaaactagttatttgggctttggaaaagttttatcacaaagagcccttttccataaggagatgctttttaaaaatatcagtctcacaggtcaggagtattgctacacccaggatagccatgaaatctaaacttcccctggcctcactgtctttccacctgctatctccatccaaatctggcttcacgtgatggcttttgggtccagatgtgaagatctgtgagcatctatgggtgtggaaacccctctcctgaggtcctggggaatagctccacatgcatatacactcccaacttcagctatgaaattctctatcttgggtccattcgagggcaggatgcaatttcaggattatttggtccaaaaatatttgctcttttaccctgcaatattctctgtctaattgcttctgttccattgtcctgtttcaaaaaacatagctcttttgagtatttgcccttctgtggagtttcaaacctccttctttctcctcttttctatttcctgggctctctctatatggaaaattaaaggctatgtatgttataataggaggcttgaggacatacaaagggctgaatgaaaattaatctcacctccactttggagagacaaaagggactcagaagagaacactgctaggtctcactggctttctctcaaaacagaatctcacttgtgatatttttaaatgttgtccataaatatcatagatatgcctatacttgttgtatgcacacccagctgctctaccagtgtcttgtccattaatttttctgttttttctgctttatttcatgatatgcttatgaaaggatttctcatataactccaagcaattttaacccttaaattaaaagtaaaataataaagttagctattttaagaaatgtgatcacgaaggataaagaatccagcaatgcagaaactgaagtgattatgaaatgtttaggttttcgtgattttgtttgttgctaaatcttactaaaatgcacttttttaaacaattagactttttatttttttagaagttttggatttacagaaaagttgagaagatggtgcaaggagttcccatggaccctgacacctagtttactctattagtaactttcacattagtgtggtacaatgaatgaaccaaatatacattgtcgttaactgaagtccgtactttctttagatttccttaattttcacctaacatttttctgttcaaggatcctatcccatgttacatttagttttgtctccttaggttcctcttggcagtgacaatttctcagcctttccttggttttgatgaccttgacagttttgaggagtacaggtcagacactttgtagaatgcccttcttggagtttgtgtggtgttttctggtgattagaataggcaaaaaacgaacatggttatggcaaataggaagatcaggcaggctcagggctccagtcaccctagtgtgcgtcctggccgattggcaactcctagcaactgtctcagagcaaggggcaacgaggggtcggggcttccaccctggcacctgggttcactcgatcctgcattgtacccactgcggaagggtgaagttccaactcagccagacacagacccctgacctggagggcaccaaggagggtgccaaggagaggtggctcacctgtgctctgggagtgaggagctgtcgtcagggtgtgtccaaggttgattacatagaattgtaccagctggagactggagccagaggaagagctgcctcaagcaatttcactaagaggcggcagtccaaggaaaataaggcagattccagagcatatgaggagaaccaagatggaaagcacagaacatatgattatgattccaagtgaaagatgcagccaaagctctcctgtgtcataaacctgttccttcctgcaggatatctgaaaaagccagggctgggtggtttatcatccaatggaaactccacagtctcttctcttccagataatgccttgtttgtaaccactgcacagacctctggattgacatctaacatatgtggtagacagaggaccagaagtatacaagacctgtaacagcatgcacagtcccatgaggagaggggcttctttatttttcttggcaaacatctgaatgatgcttgcaaactgtctgaatttgccctctagggttttccaacaatttgcatgtttttcagatgttttgggaaaaaattaaatactgtaaaaagtcatgcggaatttttttaaaaagatgccgtaagtatgacctccatctgtttttttctttgtcatcgttgttgcaatgttttcatactattcaaattcttatctctttgacattagtctgtggtttatttcctactagtggcttcgaaaagtcaaatcaacttggttgtatgtatgttttccccttaaagtgttttctcgttcacagcattaacctatgcaacataaccttctgtagcaggaattgaagaaaatgataatttttggttttaaagaaattctactatagctttttttttggtctgatcacaattttaattcataaatttcagatttgggtaatttttgtgttgcccagtaactttgacaaatgatttaatttgctcttttcaggagtttctcaaatcatttctctcaattttcacaactgatattttgtcactgtctacctgatatggttatttcccttataactcaagagtagtttaacacaaagtataatcctatagtgttggaggcttccgagaggcattgtttgcatgataagtaaatgcatattgtgaaactgtgttcctgggattggatttagcatgatctattgttggctccctttattcacaatctctctttacacaaaatacttacgaacgatattttccttagtgttaaatcccttttaaaacatgttatctcatggaggtgcacatctgtagtcatagctactggggaagctgaggcaggacgattgcttgagcccaagagttcaagtccagcttgggcaacatagcaagacctcgtttctaaaaaataatcaaaaacaacaataaaacccctatgttatgaaattttaatttagtgacacttattcagttaagactttcctatctaccaataaccatagtattggaattgaaccttaaatgtccagtgggtggtgactgcatcaaagttgaatgaaacagccttcttgctgttcagctgtttagataacttatgaatattgttagggcagctttctctgagaggttgccatttgtcatatcaatttccaaaagctgttataccttcatggacatttattctccgaatgatatttaagtgccaacacaaattaccacatgatcaagtgaaatggactatactttaaagattatcagtgtagagctcactgcatttcattatatattttaaagggattcattgccttaaatatttgctctcaagatgtcaaggttaacatatatatttttttgcagtcaaagtttccctctgttacccaggccggagtgcaatggtgcattcatggctcactgcagcctcctgggctcgaggggtccttttacctcagcctctccagttgctgggattataggcatgagttgccatccctggctaatagtattttcttatttgttcacttgatttggttattgttctgttggttgtaacttgttttacaggactcacttgtgtccacacatctgtgatccctttgaaccttaagaatcaaaccattgtctgggagcggtggctcacgcctgtaatcctagcactttgggaggctgaggcgggccaatcacgaggtcaagagagtgagaccatcctggccaacatggtgaaaccccacctctactaaaaatacaaaaattagctgggcgtggtggtgtgcgcctgtaatcccagatactcgggaggctgaggcgggagaatcacttgaacccgggacgcagaggtttcagtgagtcgagatcatgccactaaaaaaaaaaaaaaaagaatcaaactattttggcctctccattttctggttgagaaattctttatattttaaatatatatttatttccaaatttaatattgaaaactagaatatagagaagagaaggaaaatagttacctaaaatgacctaaccttcaagatgattattatcactattagcatttttccatgattttcagacttttttctatatagccttatacatataaatacatatattttaacgagattaatgttaactcactctgtaagctgttttcttacctattaatcatatggatgtgccataatctagttaattgatggacatttttattgtttctgatttcactattttagataatattgctatgaacatccttggataatgattcatttttctgtattataatgttgagatcatttgagaatcagagaaactggcagagaaaattatagtgagtcattttatgttcgcaacaaaacttgcataatttcaattccatgagagaatgtggaatgaactaaaatggaaaattttcttttaaagaatgagctttttgtctgggtgtagtggttcatgcctgtaatcccagcactttgggatgttgaggcaggagaatcacttgagtctaggagttctagaccagcccaggtaatgtggcagttgctctacattacaaaagaatacaaaaattggccagccacagtggcttgtgcctgtagtcccagctactgaggaggctgtgatgggaggatcgcttgagccggagacgtggaggcggcagtgagccaggatcacaccactgcactgcagcctgggtgacagagtgagaccctgtctcaaaaaaaaaaaaaaagaaaaaagaatgaattttatatttttgaaattttaaaacacgttagaaaaacaactatcagaaccatagatgtctacactaaaagtagaaaagttaattataactacataagaattctagaaatagtttcaaactaccaaaagatatccaaagtagaagggaaataaattataatatatttgagattgctggatgtaatgatggaaaagaaataaaatcgatccatgtaagcacataataaattataataatttcatattttaaaaattggtacagtttaattgtatcgaggtagctagaagtttgaagagtatttttggcccaggtatgtatgattaatgatcaaatggaagacaccaacaacaggaatatttctgtatattcataaaatactctttaatatgatataatagatataatgtgatatataataaagtacataccaaaaggggagcaagtgaacaaaaagtatatattattatataattagtaaaaatgttatgatacaaagcatagaaaaaagaagcaccaaaatatgtttttatttatataataattttctttcttttttcttttttctttctttcttcctttcttcctttctcttttttctttctttctttcttttttccttccttccttccttccttccttcctttctttctttctttctttctttctttctttctttctttctttctttctttctttctctttctttctctctctctctctctctctctctctctttctttcagacaaggtctcactccattgccaagactggagttcagtagtatgataagggctcactgcacccttgacctcctgggctcaagcaatctcctcccacctcagttccctgcatagctgggactataggcacgtgccaccacacccagctaatttttaaatttttttctagagatagtatctcactacgttccccaggctggttcctatctcctggactcaagcgattctctcaccttgacctcttaaagtgctgggattataggcatgagtcaccgcacccagcccaaaacatagttttaaaaagtggatgagatcattgtccagattgtagttaattaatatcaaagaggcaaacacacgaatggcctaagtaacttattacacagaaaaaggcatattcttaccaaaataagtacaaatcaacctgggggaaaaaacagtaaaaatacaaacacaaaaaagtcattgaatatttagaagtgggtatatcgtggtagcctggtaacttggttttgtcacttggaaaatgaactggcagtatacaatgagacctacaaaatagtttataagttttgatactcaataatttcactttgggttgtatattcaaaagaactaatcggaaaggaataaatatataattgtgaaacatttgaagctactcatgttaagtaatgaagatgaagtgagaatgatttttaaattgtttacattatagtgtagtatgaaaagccttattatatattatctccttcaatcctcagggaggaagctgtgacaaagagctcacataactgggactggaaactaggagtcctgtctatgcagaaataagacccagacttaaacctggctacatcctgtgtcttctggctgtgggacttcagcccccttcccaatatctctgagcagtagttttcagatctgtaaatggatcacaatgctcagtctctatggctcccaggttttgagcaataaatgagataatgcacgtggaagtggagctcctaccatgggcctgatagggcaatcactggggttgcaactttctgaaaatgggtctttaaatgaatcttcaaactgcacactgaggagcgggaagatttggaacacgtttaatcagcaagggagcaatgaaagcagagaccagtggcaatgagggccaagttaaaacagggcggagtggagttgtaaagagagaagtaaagtggatttgtttgcactgcctgggaaggagtagggtacagaggggattcaagggcacgtgcttgttttttttaattgagacattatgaacatctcagaacaaaagctttgggctttggtaagctccaccagacacctggtttagggctttttcattccccaagactcctcctcccttccatgacactcctccctgggacacatgcttggatttggctctggaaatgccccgccccaccatgaaaccatctagtcttttccccaggttacttctcttgtagtcacgcaaaatcaaggctgaggctccctgtcacgaccctcggcacttcacctgagttctaggagccactttggcagtcctctttctgtgccaccaatgggagtgaggggtgagcctggcagagacacacatgccaccctgggctttgtgacaaggcctggactctaatgggtcaaacccagggcaaaggccatcctccatctaggtaacgaagtgttcatgactctgtgacagccaggacaagggcagtaagtttgcagtagaatgacactgcaaattggtgaaccttagtgtagggtacgtcccagccgggctttaatacagagcagcaataatgacaacaacattgcgtgtgtgtgtgtgtgtgtgtgtgtgtgtgtgtgtgtgtgtgtaaaactggtgcagtcctatccattgtctgattcgatcatgagtgccacatcctccccagacttgggttagagtagacccagatccccagaacccttttaaacctgggtgatttagaattcaaactaccatcacttctccagactagattaaatgccacctggactgatcagatccaacatcctaccatgagtctggtattttctttgctattttatctagataattcttatttaatcctttcagcaatcctaggaaaaaaatattcttatccccattttacagagaaagataaggaggttcagagatgttaataacttgctccaggtcacagagcaaatcagccgtgaagcaggtttcaaatccaggtctgcttgactccaaaatcgatactcatgctactccgatgcatgctacagagagtttttctgggccagtagtgggaagaaggtagagatttttgcaaaattgtcttagggacccagtatagaagtatgccactaactttggggtttctggaccacttcctgataaggggcagagttagatgggatgccgaggatgtctgtgtgttctctatgtacacacagcaagacagacattttttcctttaacatgtgttttgctttctatagagagaatcctttttctgacagtcactttctttccaaagcttagaacatcataggctctttggcagagagtacagctttcaacaagaaaaagaaaagtttttggccactctgcccccttgcagttcaagtataattcaaaatatctgcttctatttgtttgccttttgcaaaacctcaagggtgattttgaaataaataggaataaaatatttgactgaaccaaaagagcccagtacctggccatccgaaagtatttatttatttgtttaaacattgctggagtaatagaaaatttaaatgcagttatcaaagaccaaaagttcagagattaaatactatgttagagtcattccttctaattaattttgaactgttttcgaaaaacgaagaacttgctggggagacaatgatcaagatcgtaacaaagttcccctagaagattaacagagcttggagtttactgtggatctctgcctgtgtggagaagaaacagtcaaactagaggaaacaaaactgtctctatagacaaattaaattttagtggatgttcatgtgcacaggtgggcagcagcaccttagtctagtatgttgggattgggatcagagtctttttccataaatgcagcagcattgagcaatataattccatctaaaatcttattgtatattttctcatctgcttacttttttttgtttgtttgtttgtttttgagacaaagtctcgctcttttgcccaggatggagtgcagtcacacagtcttggctcactgcaacctccgcttcctgggttcaagtgattctcctgcctcagcctctcaagtagctgggattacaggcatgcgccaccctgcacagctaatttttgtatttttagtagagacagggttttaccgtatcagctaggctgatctcaaactcctgacctcaagtgatccacccacctcagcttctcaaagtgctgggattacaggcgagaaccaccacacacagcctcgtttgcttacttttcaaaacagctctgtgtttgtgtgcgtgtacatggtaaaatttacaacgaaatacacatttagaatacattcagtgagttctaataaatgtatacacgtgagtgcctcaaacccttatcaagacataaagcattgccatcaccccagaagcaacggctgttctgaattagtgcattagttttctgtattttgggacttcatacaaatagaatcatatataatgtgtagtttttttggataaggcttctttgactcagcctaatgttttccattcattatcatccatattccgtgtattaatagtccattccttttgattattgaatagtataaccattatataagtattctacactttgagttgggttattttctattttcctattgatggacacttggctgtttccagttttgagtcaaataaagttgctaagaacattctagtgcaagtctttttgtggacacattttatttctcttgaatagatatctatcaatggaattgctgagtcatggggaaggtaaatgtaaatgtcagggttttttttcccaggatgattgccccacttcatacctccaccatcaaaatatgagagcacatgtttgctgccattagatattatcagtgacctctcattttagttttaatttgcattcttctggatgactaatgacattaagcacttcatggttctttactggccttgtgtatgtcttcctttgtaaagtgactgttcaaatctttttccattttaaaatattgggttttctttcttttttccttatttttttttttgagatggagtctcgctctgtcgcccaggctggagcgtagtggcatgatctcgggtcactgcaacctccgcctcccgggttcaagcgattcttctgcctcagcctcccgagtagctgggattacaggcaagtgccaccacgcccagctaatttttgtatttttagtagtgatggggtttcaccatattggccaggctactcttgaactcctgacctcatgatctgcccgcctcggcctcccagagtgctgggattacaggtgtgagccgccgcgtctggccaggttgtctttttattactgagttgccagtgtgctttacgtttcttcacatggtatatatatatatatatatatatatgtgtgtgtgtgtgtgtgtgtgtgtgtgtgtgtatatatataccctctccctcagagagtggagccccagttacctcatctttttgtctgtctttctccccagaatgatgccagggattcttctttgtttggtactatatttccagtgcttcagattgccactggcactgagtaggagctcaataaacatttgctgaaagaatcaatgaataatcaagtaaactgatttttgggtctgatattcagacacaatgttcttgaacttaatggcattaattaacaaggaaattgaaaaaaaggacatttaaatgctatccttgaggtatcacatatgcttggcaccaaggacacagaataccttcaggggactggacatggtggcttctgcctgtaatcctagtactttggaaggctgaggtgggagtatcacttgggcccaggagttggagatcagcctgggcaacaaggtgagaccctatctgtacaaaaaaaaaaaaaaaattaaccaggtatgatggtgtgcacctgtagtcccagctacttctagggctggggtgggaggatagctggatcctgggagttcaaggctgcagtgaggcctgattgaaccactgaactgcagtcggggtgacagagtaagtccctgtctcaaacaacaacaacaacaacaaagcccaaaacagaataccttcaggggatttgttcacccaggggagatactgctagactatctcatggagtggcctaatttgtccccatttatgagccctctagtgtaagccatcactgctgtctcatctaccgcattctgggactatgcccagccacttccaagtcttggattccgaccagatttgcttaatggatgagcagaacgtctagctttagagagttttaggtaacttcacccagctgatcccactgtgcctttaaccaccttcctcttggccccttctgacactgataatgcctgttccctaaccattggcccctctgcctggctctgtctcactagcaggcccatccccactctgtgctctgcctttcttaacacccctaaagggccacgcaggaaaggatgggacaagttgattatgacatccctttctagctctaaggaattcaataattctgatattcatccctaaagaaatttatcagcagctattaattgggctttcctaatttgacactgaaaggccggtagggtcccctaagtcttgaagccattttcctggtcccgaatccagcagattccagcctatctggtttggggggtgtctacagtgaatcatctgtattcacatttatagagaactttgccatttgcatgttcatatctgtcatcttatgtaaactgccaaacagttctagttgtagccctctttagtttctattttcccgaagtttctatttcccaaagcaaaaagaggtgagttttcatttcttttttttctttttttttttttttttttttttgagacagggtctcgctctgttgcccaggctggagtacagtggtgcaatcatggctcactgcagccttggcctcctgggttcaagtgatcctcccacctcagcctctccagtagctgggactacaggcatatgccaccatgcctggctaatatgtttttatttttcgtagagatgaggtctcactatgttgcccaggctgatctcaaactcctgagcttaagcaatcctcccgccttgacctcccaaagtgctgggattacaaaccactgctcctggcagagttttcaaaaatcctctagctcttgctaaaaaaagttggtgctttcttagctctggtgggtatgcaagtgtaatatttaaaaggctcatagatttttacagttcagaaacctggattctgtctgtcattagaaattcaattacacaccgcagacatctatgagtagttcctaaccttttaatttaaccattattatggattttttcccccttggatcacatgttattttcttttaagtccaccaaaaactgtatttattggctcactttaccttttttattcatcagacttgtacctcccagtcagagtttagaatcaggatcagatagtctcttacctcactaagctgattttattacagccaaaataaagacatttgatatttaattagcttccaaacctaataactagtacatttccatttctgctgggctttttgaaagattaaaaagttcatacattaacccttgagaaagtggaaacagtttagttcttgtgaagaagtagccctgtgtgttcagggacttcactcttgccgtgtctctgatgtctgaatgggagcaacggggatattactgactttaacccttttcactgcgatctgggcctttctctggctctatagggactggggatcaaccacccccaccctagtatttcctcagctactggagtatttgggttctcagttcaagcctataggacttggggagaacatgcattcactgaaacgatgacattcctctaaggtgcaaatgttaaaaggtcatgcaaccagaactattacataaaatcaaaaattttccagtttgaattatactctcaaaggaccatgatgagtattctaaaggcagtgtttgtttctaaattaatagaattaataaatgttattctgtttgccaattatagaagatacagttgttgaagactattaatgtaatatgcaattgcattataattgtattatttaacagattgtgttgcatgaatcaatgagatatgatgctgtaatttaaaaataattattttatggaagcaaaactgcttatgaataacattaagtgaatgcagaatgaataacttaggtatgtagactcacagctaagaaaaatatatatacatgtagctaatggctcagggtaatctgcagaaatgaaaaaaactatattagaatggacaaaggtgagtctctttcaaaatattttttatataagttgttacatgtatcagtttcgcaattaaaagtttaagatggatttatattggctccagtgaagaatatgtgttttattaattaatactgtgcttggttttgtcttattttataggagaaccagcagaaatccaccaatgtagtctatcaggcccaccatgtgagcaggaataagagagggcaagtggttggaacaaggggtgggttccgaggatgtaccgtgtggctaacaggtatgtcatgttcatatatatatatatatatacaaattgcaaactgacatgtgacacaattttatggaaattagtgtaacgtattacatgcttgttttatcattagaaggaggctgggagatgtagtagaaagcctgggtgttagtcctaaccctaccatcagtgagaaatagagtcaaggtcaactacagaaataagagtctgatcaagtcaactgtgaaagtctctagttgtcacttttctcctctttggcaggaaaggacgggacaagatgattatgacatcccctttcagtgctaagggattcaataattctcatgttcatccctaaacatatttactggcagttatgaatgaggctttcctaatttgacatcaagcatttggctgtccataaggttttggatatttagagatattcgttattgttgcctaatgttttgacattctaggagactatttcacttactatataaacaacaaacaaacataagaatctgtacaagaaggaaaactagcaatttccatttggctgaggattgcccttgtttacagaaataacttgctgctgctgaagtgactgaatgactctcccttttcttgtgtttttatagccacagaatgtcaaaactgagaattagtgacagaactggaattagaacctgactcccaatagctggccctaggctgttaccttgtactctgagtccaaggtagacaaaattatttctggactcaaaaggaaaaaccaagttcatttcatagacaacagttttcaaatggaatgagcccacctgcaaaactatgtttattcaggttataaaatgataatgttttctaacctggagctcattctaaacaatctggcaggtggggacctgccttgcatcttttcttgctgtcctaaatctttgcccttttctgtcccaactggcctcattcttgtactcttcaagtttttgccttgtgcctttggtttcctggtttcattcatgcctggactgtgcatcgaaacaactttctgcagcctccagtgcaaggacagacagtgagcaaggaacctgctgtgctctaatatgcaccatccttctgtcattactcctgaaatgtttacctcaactccccccaagagacgtaatttgagcagtaggtacagctgtattctagaagatcccctcctgttatatgtttcccttcatgcgaagatcactggtgaaaacaactttcgtgttgggctatacacacaaagtccattttctctaatgtgacaccccttgaaaagaaaaagagaattggtagaagagaaacatatctaaagggtatactttctccttctttactcttaaaatgaattatttcttcattagaggaagaaaagaatatatggcaaattttaaaaaatcaaggccgggcttggtagctcttgcctataatcccagcactttgggaggccaagacaggtggatcacctgacatcaggagttcaagaccagcctggccaacacagcgaaaccctgtctctctactaagaagacaaaaattagccaggcgtggtggtgcacgcctgtaatcccagctgctcgggaagctgaggcaggagaatcacttgaacataggaggcagaagttgcagggagctgagatccgccactgcactccagcctgggtgacagaatgagactccatctcaaaaaataaaaataaaaaattaaattaaattaaaaagtcatctttttctaatttattttttattcttatgttacaaaggtaggctgttgaccaggcagaccagaagaaacaaaatactttaaatccatagactcagattttagccccaactccacctccatgagctgtgtgactttggacaagccagttaggctctctaagcctcagttttcttatttgtacaatgggaataaagatagtacctgacttatggaggtgtcgatagaactaaatcaataaaagacaaatgtgctttgcacagtgcctggcacatagttaagttgtcagtaattgtaattagtgttacctcaatgtatgaaagtacgtgtgccaacaatctggttacatatacttactgtaatttagctctttgtttcctgagagctgaagcaaaatggaaggacattctgttatttctctcattttctgacatgagagaacacaccagagattcaggagtgccacttcccctaccccacaacctgacataaatactaagaagaatttatcacctatgtctttatttaaatgaaaaggaataacagaattacagacaataccttcaaaaatgatttgatgaagttagtgttgacacgttcttcatacagccatttcttctaatggtcctctgtcaaagccaaaggcatgactttaaaatataactaaaagtatggagactattcaccttttgcagatcaccttcccccccacccaaatcctccttcctctgtctgtccttcattcctgctttttctgccctttttcctctttcctcctgttgtcttctctgtatgaacctcttggcttttttcctctgtcatgccaaggtgctgtcggacagaggcttggcaccatgaaatattcttaggttcagagatctttaagacaaagatcctaaaatcctaaaggacccatttttttttttagagtgctagcctttagggtagttcagatttaaactgttaaataattttggcaggttgtgtttctttcccttcttatgttcctcctcatatggaaattacaaagtgtgttcctgatcattgtgctttgaaaccatggtggaagccacatggtaactcttttctcatataaagactctagagaatctttacacctaagagtgtgacatatggcagctctaaatacatctgctccctagctcaggccggcttcctgtctttatgttttgagagtcattttggaaacatctagaagccaaaggacagcctgcgggctctgtaagacggttgttcagtggcatccacgagggaggtggacttaccagtctccaggggctggctgtttccctccattccagctgattgctgactttgaaggggatatgagaccactgtcaccacatcttttgattttttcaagagaatacagaatctggatttgtatacacaacttcctttttgctttggagacaaggcctcgctctgttacacaggttggagtgtagtggtgccatcacggctcactgcatgcagccttgacttcccaggctcaaggggtcttcctacctcagcctcctgagtagctgggaccacaggagtgcaccaccacacccggctaattttttttgttttttgtagatgcagggcctcactatgttccccaggctagtttcgaactcctgggctcaagtgatcctcccaccttggcctcccaaaatgctgggattacaggcatgagccaccaccatgcccagcctgtatgacaactttctaatctttaaaacactctgcagcccaaacagaacacatcgaggaccacatgtagcccccaaatctccctatttatgaagcctgcttgctttgaaaagctataatcctaacacaggacaaatagttatttcaaaatttgagagaaatgtaagtacttgccttgtagtcaactacactgatttctttctttcttttttttttttttaagatttagttatatttaaaattactagattagttcacaatttgtcatcttaaactatccaggccgatgtcagtctgttttatctgttctgaacaggtctctctggtgctggaaaaacaacgataagttttgccctggaggagtaccttgtctcccatgccatcccttgttactccctggatggggacaatgtccgtcatggccttaacagaaatctcggattctctcctggggacagagaggaaaatatccgccggattgctgaggtggctaagctgtttgctgatgctggtctggtctgcattaccagctttatttctccattcgcaaaggtaaaaaaaaaaaaaaaaaaaaaaggcactacacacgattcccacacacagtgcaagtgctctccaactgctaggggaaggaatcggagagggagggcataagaatgtctcctttcaatttcccgactatttcttcccccaataacaggctctctcatttcctctatttaatattggttatataaaggagttccttcctttccagatgccagggcaccagtagacataaacccttccatgttcacaattataaggaacatttggtgagagtcgaagggaagagaaagttaaacaagagaaactctaaacctctgtaattttagttgtcggaaaaaggatctagttaaagaaaagagcagttcatggccaaagcttcgggttctatgtgtttaatgctgacatcactgagatggagtgtcactcttcttttaaatcaggaaatttctgggagccaaacatcagatgtagcttagaacacatcctttgaatgaaatgctcccatatggccagtgctttcctgctaagagggcctattttccatgattttctgtgaaagtccttgagagagctgtgtttaccagagtaaaatttctggactttctctcaagcactctgcaaagcacaaaccccagtgttatctcaaggctattgaaaaccaaagtacacagtgttttgtgatttagaatttcaccgtgaaacctctttttacattcttaatcatattgcttttcaggatcgtgagaatgcccgcaaaatacatgaatcagcagggctgccattctttgaaatatttgtagatgcacctctaaatatttgtgaaagcagagacgtaaaaggcctctataaaagggccagagctggggagattaaaggtaagagaattggctagtagcgtctaccagttacataggctgtcagtcctcagtccttattctgtcctcagaaatcttccttgagtttcaaactgttttccaaaattgcatataacatgcacaactttttatcagatcatgatatattcagtatgcccagaggcttattaaaaggtagggttttatttttaagaattgtcatctcagccatatgcaataacgttcagagaactagaatggatatttatatgtgagtgtgtgtgtgtagaggagtgtttcagagttcttccttattcttgtcttcctttttgattgtaatcatctatagagggcttcaacttagccagcaggattttgttgacaatttggggctttccatattgaaaatacagctatatattttcttacttatggctagaagtcaaggatggctgtttgaccttttctgttaaagtgtgaattttcagtttaatacattattccaacatgtgttttgccttattgattaaaaagattattctgtcaatacagatgcgatgattgtcacccatatgctttgcaggatttacaggtattgattctgattatgagaaacctgaaactcctgagcgtgtgcttaaaaccaatttgtccacagtgagtgactgtgtccaccaggtagtggaacttctgcaagagcaggtaggtgaaccggttgtctttttttatatgtttaataaaatcatgaaagacaatctatgcctctttactgaagcattctttttacagttttcaagtttttaccaatgctgtttcatttcagaacattgtaccctatactataatcaaagatatccacgaactctttgtgccggaaaacaaacttgaccacgtccgagctgaggctgaaactctcccttcattatcaattactaaggtaagtgggtgcagactggtcaaataattaggcttaatatcagtcattataatttatttacaattactcttaacaataagaaaagtataaataaggtgcacataatgtccataaataaaacactcctttttttccaagttatttttaacctcttctccaaagaaatctctcaccaagaattgccacaaggcagctgatcaatgccatgtatggaggtgactgggaaaataacttctgtatttgcattggacaattttacatagctgtcattgtaccagtaagtacatctggtagaaaaatatagccagaccaggatttttgtggataaaagaaagaaagaataaacagtgaattttcaactcagttgcacattttgggaatagatacaacctaaaaatgttcaaataagtcatctcaatacaaaatcttttcaccactatttcataggaaacttccaaacttaaatatttctggcccttagatcatgggttagcataacaggtggggacacttaaaacatagaaggttctgccctcatcctcctgttaactgaataagaaaggacttccctggggccagatgcctggaaaacagaacttatgaaaatgttcaactactttttgtgttttgcagctggatctccagtgggtccaggttttgagcgaaggctgggccactcccctcaaaggtttcatgcgggagaaggagtacttacaggttatgcactttgacaccctgctagatggtatgtttttgttgttgtttcttactctttgttgttaaggaaaaaaaaaaatctttcccagaagttttgcaggaacaggaagttagtctttagtttgcaaatcttattgcaaaactgtttggatcatttacagtgtgctccattctattatgtttaagcttccatttttaggattttttggttgttctcaaaggttgttcctttaaaactaaggaactgaaaaatggtgtaaagccaagagaaagacaggtctgtttcatctccacttgctctttgctggtgctgatattcagaaggtagcacgcagaagtaccattgccacctgctagggacattcctagggcagccaagatgaggtcagcacatgttgctgacctccatggcaccctccaccctccaggttgctcatgtcaagcattattgcaacaactgctttctttggtgcatgctaaagtgtcaatgttcatgcccacacatgaaatatattaaaatggtttcatccactacactctaacaaaagagcattaaggcagctttctggccacgagctgaatggcttttagaaaaccaatctggtcaagctcagaaacatgtgttattgtgaagacttccggacccttctgtgatcatttccttcctagaactgcctgaacttatcaaataaacttatctatttcaagaccttcggggaatggctgctaagtggggaaggagtaggggtagagtcacgctgaatttgtaatgctgagcagggctccaagccttttaggaagaaaaatcaaataagatgctcttttttgggagaggtgttcatgtcctgtgtttgtgcctttgcctggggaatggggcatgaactcagaatcagaactcaaagactgatcagcatgggccctcttcccttattcttttgctgtgacagataacaccccacaacctgaatccttcacttctcagattaaataatattccccaaagacacttagtttacttctagcttgctttaacaacaaaaataataatgcatatccctataccacgtctctgttttcaaagcattttctcaggcattatttcatttgatcctcacaaaagccctagaaaacaggcagcaattattatcccactttacagatgaggaaactgcctcagattaagtgatttgctcataacattcataagtgaaagcccaagaccagagtccagaatcttaggaatcctggcccagtgctccttacataccagtctgctctcctgatgtcttttccaatagaatctacaaggcctgatggtctacaaggaaggctgacttttatcttggtgtcttgattttgacacatgctgaacaccgactgcctgaagtaaaggtcattggacttagcagctagccatgagcaagaggttgattttgagcatatgaacagagctgtggccaaaagacaagtgaactacattgaaagagggggcctcattacagacaacaaggtgctgttgaccttggacaagtgttcctctcataaagaaaaatactagggtggtggaagtggttgcagaggtcagtgttaatggaaatcagaggtccttagcctgagatctaggacttcagggtgggctaacaaaaaatcttagaggcaaaaatgtttgtgttttgataagggaaggaaggagcattttcctgggttgagaatttatagcttttgatagattctgttttttcctttaattattttttattttttagaaatagggtcttgctccatcacccaggctagagtgcagtggcatgatcatagctcactgaagccttgaactcctgaattcaagcaatccttccacctctgcctcctgggtagctgggactacaggcatgtaccaccatgcctggcagatttctaaatttgttttgtagagataaggtctcactatgttgcccagggataaggtctcacagtgttgcccaggctgatcttgaattcctttcctccagtcatcctcctgccttggccttgcaaagtgctattatagacaacaaattcttaaaagagtctgtgatccaaaaagatgaagaacagctaatgcagataatccatctggatgatttaggcaaaatctctagcctttcttttacactgtctcaatttcattttatgggggtttttcaacttgcaaaacctgttgattttcttttttcttttcttttttttcttttttcttttttttgagacagagtcttgctctgtcacccaggctggagtgcagtggcatgatctcagctcactgcaacctctgcctcccgggttcaagcgattctcctgagtagctaggactacaggtgcatgccaccatgcatggctaagttttgtatttttagtagagacagggtttcactatgttggccaggctggtcttgagctccttgacttcagataatctgcccgcctcagcctcccaaagtgctgagattacaggtgtgagccacggtaccctgccaacccattgattttctatttcttatttgatgctcactaccgtgaggtggatgaagcacttattattgctcccactttccatgtaatccagatgtctgtccccgcaaacccaccagcctggggatatgaatgaggttaccttcccattaatacttgaagcctactagttccaagcccctacctgctcatgcagaaagcccagttctttcaaaagcctacccaagtgtttttgggagtccccaaggggtgcgtttcctgtgttcctgagtcagggccccagccatgtgccacttgctgtgtgattctgtgggtctgtctgtactcagaagtgcagatcatgctgggtcactccagccaccaaagttttggtgccagtagggcttttgcagtttatggactcttcttcaagtgggaaaaattgtttccttcctctgtattaacctcaattgaagactgtctaggaggttgctttagttccacagtgttagagaattgagtgaggcaactcttgtaaggtgtatagatccctttatcctcatgtggctccagtgtggctctgtcaggagggttcaagatcagatgttttgctatttccatatcctttccccttccaagctgcaggacctgtgtctgaaactttctgtaagattcttcttttccctgtgggaattatctgctggttccaccatctacctctgcaaacagagtccactggacatacttatacaaccccagttatgatcaggattctgagctctgcacagcccacagaagcatcctaaatgcctgtgtaaattgataataaaaatagataatcagggatatgatgtgctgcccacccctaccactcgccgtatgttaagttactttgggtctaagtagaggcagaatatcacagtggatgagagtgtgagctgcgaagtcacactgtctaggtttgtatgtcagtgattagctatgaacctgggccaaattacttaaactctctgggctttgttccttcatctgtataatggggatgttaataactgtacctacctacctcattggatgttgaaagtttaaaagaatgcctgattcaatagtcagtatttcatacatattagctattatgaacaaaccactctgcatacagttaaaagaatttgtcaggcatggtggctcatgaccgtagtcccagctactcagagcctaaggcgggaggatcacttgagcccaggagctagagtcccacctgggcaacatagggaaactttgtctctaaaaataaatacataaataaaagaacctggagtcttgaagagactaagtgactttatccctagtcacatcaatttggaagtagcacagatacgatgttcgtcagctagccaacagatatacactgagtgccccccatgtgccagggtttttctagcgtctggagatagaatggtaatgaaggcaggtgagcttgctgagaaatacagtacagtcattttctgagacctagtccagtaagtccttcccgccccccatcagtggttgtgaaactttcttttttattttctttttcttattttattttattttttgagacagagtctcgctctgttgcccaggctggagtgcagtggcgcgatctctgctcactgcaacctctgcctcctgggttcaagcaattcttctgcctcagcctaccaagtagctgagactacaggcgcttgccacgaagcccaggaaatttttgtatttttagtagagatggggtttcaccatattggccaggctggtcttgaactcctgacctcaagtgatccacctgcctcagcctcctaaagtgctaggattagagccatgagccgctgcacgcagccgaaactttcttttttaaaccagataattctttatttcatttcaaaaatcagaggcaatctacacaacaaaatggaactgcctcactcccccagtagaagggagtaggggcttgggctccctttcacctggagagcagcctggagggtatcaggaggaagccatttgaaacgcagcaacagaggctcctgacagtgcctcacctgatggcgtttggactgaggagacagagttaaattgtaaaaagtgatttatttctatgtcagaatgttgggcaagatatcatttatatagatatcatttaattgtaaccaattcatgaaggtttgagtcactgccattgaaaatttgaaatgatctccacagccacagacatgtgcccacttttgtcttccttcaaaccattgcaaatttcttgattacctacaatctgaaagcaacattgtttttattctgaccatgtctcctaaaaatattttgttggttttaattttctcaaaggtttatattttcccctaaatttaaaaataaaatagttctgtctactcagtccaaaagccaaaaaaaaaccccaaaacaaaaaccaaatcacttgttagagtatatgataattgtgtagtatgagtcactccatattattactcaagaatctacttttatatcagtgtatcatatcactttatttctcactagaagtatagttccagggttgtcacagaccctttgatcataaatgtcacatttaaatttaaaaatgcaacctcaagcttgtgttgactgatggcatccaagtaggatcaagacaggggagccttgtgagactccatcatttaatggctattcttccgcagctctgactttccaagggagggtgtgagagtactctgcatatatcaccagcacttattgagcaccaattgtgttctgacactggagtttgacatagattattacatttaatcaggataataccactgtgaagatattttgtccacttgagaaaatatgtattagaaaggttaaataacttatttgaagcctagacttaaatccaggttgtcctggatctaatgttggtgcttgttctgctgagcatattttcatgtcctctaaccatgtgagattctaggatgttctagggcagtttgcttctatacttgctcccaaagcctagtttggaaactattctacagtggttgtgagatcacatgtttgcaagagaaaacttcttggtgaagctggaggggacattaacatatgttataattattttaaaacagatatctcttcccagtggatggaaaaataaataaataaaaaattagaaaaccagataaacatctgaacaatgcttttggattgtattgaacaacattccatacaagttctgatttcaccagctttttgctattatatactctctatttttaaaaatagcatgacaaagctagtatatttgtatgttgtatatgtgaagtgtcataataggaatttgttctttgacattgttgctgtaagattcgtttggtggagagctgaaaatgtttcttaattgtgtttatatttccctaggcatggcccttcctggtatgtactttaactttccaagtagctaaattattataattatatatgttaaattaactggaaatggttaagaacataactaaaagaaaatctacattaaccagttggaatcgctattagttcatgatccaaccagctatagtagaataacactgtatttttctttagactggagtccaaacaacaggaaatttcccaaccagatgtagctattgtgtatgatgtagcatttggctgacaaaagtaaacttgtttctaaattatcattgtacattttgttcctgagtcttttacatttatgatcctcttccaatgactgttggtcctcatttagtttcacaaagctggaaattttttttcctacagtgtttataaaagattttaagttgatgaagaataaatcgatttaaactgaatgtacctggttggattgtgtatgattgtacttcatttgtttgcaatgtatgattatgcatgaacttaatttcaagccattatggttgcttgttatggaactgggagtaaatatacatttgctgtgactgtaaacttctgcattgtacaagaatgaaaaggtagaattctgaatatgtcatctatctttggtgttgctttcatcattgttgtttttcctttaaaaagcccagttaagcaataaaaagtaatttaggttttgcacagaaacagtcccaaacaaccatgaagcagatctataaggctaacacagaaggcttgaaaattattgaaagcaaaagaaaaatcattccattgaacaataagctatctcttggacttactgtggttaaagaaccacaatattctttttcaaaataagatataccacaataaaataatcaaggcagtgcccaccagagccaaatgaagcacatgaaggaaaaggctgaaaactcaagtcagggttgaaagtcatgggtgatgtttcagcacagttcaagtattacatcttagtaatagttggatacgtttatatattagaaaggttgataaagatgatagggaaactacagtaaatctgtgtatacacatgtagtgttgtagctacaggcttataagatcagttggcattattacttggcagaactcctttctataacatcccacagattcacttccttattgagacaacctgccagagtgttatttagtcatttcagattttcactcaaggccaagatgaaggtagattagaggctaaattggtcaggaatctagtggacaagaggaggtggctgcaacagtgaaacatcccttggatttcaagtcagaatacttgatggaaggcaacgttacagacgtgttgcaggcagcgctaggttctttcagcaccctgctccacattttgctttgcattttgctttatttcggccaagtcattctttataagcagaggcaaatatcatggtcttcctttcagcaatgtggtcagtaagcaatccacagaaagcatgatttctagtgacaacgacagcatttctgaaggggttattctttgttagcctctctcccttttcctcaactagactatgcagtggatttaatcatcttccatcagcaacctccattaacatagtgctttacagtttgccccctgcagcaacccatggagatacatgtcatttattagcccatttttccagtgaggaaactgagtttagaaaagttgaatgacacacatagtaaaagggagaactgctgcctttgaatttagtgttctctgcaaaggacttagctgctctaattgcccgagaacgttgaaacaaagagttatttgaatgacacaccattactttctgtatgtacacagtatctagtttgtggtttataaagggtctcaaagtatattgcaggattttatgatagaccggatttgtttattgccggcagttgctgtctatttccggtgacattctttaggttctagtaacctttggagagtgtttaaaaggtgcaaagtgatatgcctggaaagtttagtttcataactactagggggagtcttatgccccgaaggaatagaactctaatctttaactctgtcagaggccttctaaatgttgcattgaaaagttaggtttaaatggcttcattaatcatggcacattccctcaggtccataaataactgcatttgcttcctctggagttaaatgttttctttattcaccttcctttcattctcttctgaatcttgaacttgagaactctcacaaaattgtccctaatattattttgtgttatacgcttaaccatgagccctcattttctcatctgtgagtataattgagagaatagcctatttgtgagggcatcattgtaggaggaacaccgttttgtacatttttttacattatctagaatcatagagaaatgagatgtttttagaaagccaaattttatccctttaagccccagactgaaaaccaactacacattaactatcttatttagaaacatttcaaaatagtcttactaaaaaaaaaaaagtattcactcaaaaaaaaagagaatatgttcaatataaaggaacttttaaaaatgactctgtcattattagttttaccagttattaaactgggcactaatgtaatggtgccctgaagatggggagacctgtgggattgttggctcccacactaaagaacccccataactctgtatttcagtttcagtgttagaaccttgtatagtcagggttctccagagaaacagaacaaacaggatgcatatctgtgtgtctatctatatacagatatgcatctctctatatagacatagatataaaatatatgtaacatatttaaataaatttatatatatgcatgtacatatattaatttatacatatattaattatatatatacattattttaataaattatttattattatggagccttatctctctatgtattatacattgatatctatatataacatatagatattatatctgaattatataatatttctgatatatatctgaatagataacaatatatctgtatgttacatatggatatctatgtattatatataggtatacaataaatctctgtctatacacacacacacacacacacatacacacatagaaagagagagatttattttaaggaattggttcgtgtgattgtggaatctggcaagtccgaaaactgggaggctggggaccccgagaagacctgcggttcaagtccacaggcggtctgctggcataattctctccttttctggggagaagagtcttttgtctaattaggcctttgactgattggatgaggcccactcacattctggagggtactctactttactcaaagtctactgatttaaatgttaatcccatctaaaaagtacctctacagaaacatctagaataatgtttgactaaatatctgagtactgtggcctagctaagttgacatataacatcaaccatcacagtttctatgtgtattttttcagtagttttcctgtctcttcctttgtggtccagctgtcattggacatttcttgctgctgaagatgtagcttctctgaataccacattcgatgccttctaatttgctgtgctgtatactgagaaatcagaacaccctgtttatttaaattcctcttaaagcaagagactcagcataatggtgagaggagctcacactccagagaaagtacatgtgcgttaatgacttgatgtcatttttcactcctctgtggttttggacagatgattctcaactgtggttgcgttagcaagacctgtgattcccagataagtgagattaccagtatcctaaaaaatatttaggaaagagggagcaggagggggaagaaaaggtgattttatgctgaaaccaccatgaataacatcaagaggactgctcgtttgggatcccatagattagtgggttttgttttgttttttgagacaggatcttgctctatcacccaggctggagtacagtggagtgatcagggctcattgcagcctcaaactcctgggctcaggtgaccctcttgcctcagcctcctgagtcgctgggactacaagtgcatgccaacatgtccagctaatttaaaaaaaatatgtgtgtatacacacacacacacacacacacacacacacatattttttggtagagatgaggtcttgctgtgttacccaggctggtcacaaactcttggcctgaagcaatcctcccatcttggcctcccaaaatgctgggattataggtgtaagccactgcacctggctgaaaatacattttttacaagtgcatgagatgggtacagaaaatagaatgaataagatctagtatttgatagcacaacaggatgactatagtcaataataatttaacggctgggcacggtggcttacgcctcttatcccagcattttgggaggctgaggttggcagatcatgaggtcaagagatcgagaccatcctggccaacatggtgaaaccccgtctctactaaaaatacaaaaattagctgggagtggtggcacatgcctgtaatcccagctactccggaggctgaggcaggacaatagcttgaacctgggaggcagaggttgcagtgagccaagatcgtgccagtgaactccagcctggcggcagagcaagactctgtctaaaaataaagtaaaataaaataaattaacagtgcatttaaaaataactaagaggataattggatttttgtaacacaaaggataaatgcttgaggtgatgggtacctcatttaccctgatgtgattattatgcattgtattcctgtatcaaaatatcttatgcaccccataagcatatacactatgtacccaagaaagttaaaaatttaaaattaaagaaaaaggtgaatgaggtattacccagattgtggctgattagtattaaaaaagacaaacacacagctgtcataagtaacttattatacaaaaaatgcatattctcattcccatagattcatatcaattatctgatttttttctttgttttcaattcagtgtattggtatgcagatagagcctaaacaggtaatgaaataagagacttgcttaacgttcttacaagtttcatttccaagaaagactagagagttttgttttggtttgttttgctagcttaattttatttaattgggttttggaaaattttaaactccctactgcattgaggtcaggacttagatatgaaaagggaacccacaaagaggcgtttccaaagttagatcacttatggaggccacctccatgatttaaaactcaacccacttttcacatatgctccacttgctttgggaagcccttcaaggacttgtcattatagaatctagagaaactggtgcagctaacacaactacttggatttgggtcttaatgcttcttgaaggaaatgtttggaaggggcattgtgcacatttgattcatgcttcaaggatggcacaccttatatctagttttcgtgcatcacatggctctttccacagatggcgtgatcaacatgagcatccccattgtactgcccgtctctgcagaggataagacacggctggaagggtgcagcaagtttgtcctggcacatggtggacggagggtagctatcttacgagacgctgaattctatgaacacagaaaagaggaacgctgttcccgtgtttgggggacaacatgtacaaaacacccccatatcaaagtaagtcacaaaacctttggaaggactttcttgagctatttaaactgagaagaaaaataactctttttaattcctttgcaaaggacttagaaaaactgggattaggtggaagaatgtatttctaaggtagtgtttgcaggctttgcctcaggagatgtttttagaaaggtgcaaagaaatgtctttctgtttgaggtctggtctcaatgatctcttgagtcctcagattctgcagtggctggcatcctcagctaaatgggaccagataagaaatttagtctgacaacatgagtagagaaacaaaatcatagctgtagctatgcacaaaaccataatcagagcttgcagccctgcccatcttgaaaatgcgcaaggaacataagtatcttcataaagaatggacccaaccaaatgctggaacaagaactcagagttcatgctctgtggctagtgagggggtcaatgatactctcttagtaaatgatactctcttagtaaacaaaaatcagcacagatagtggcagagtttccagaggaaagatattttttcagtggatatttttaagattgaaaaaaatgtgttcatctgataggatcaggtagggtctatcatgcctaaagggaaaatagactaactcctcagattccttcacagcttctaattactgtcggtgatggggtggggtgggattttattaagttgctggctgtggttcatttcccacaaagaaaaatacatgaaattgaatggtaaaaccatccctcatccaagataagagcagtagggtggaaatgaaaaaagtcatatactactaatttgacttctcaaatctcccagcatgtccctttcagcatgttcacaggaagagagagcactgtcagacccaggagactctaaaaagcctgggattagacaaggcatgccctccctctgggcctcagtttctttattataaaaggagaggccaggctgggcgcggtggctcacgcctgtaatcccagtactttgggaggccgaggccagcagatcacctgaggtcgggagttcgagaacagcctggccaacatggtgaaaccccgtctctactaaaaatacagatattagctggacatggtggcgggcacctgtaatcccagctactcaggaggctaaagcacgagagttgcttgaacccaggaggcagcggttgcagtgagccaagctgccagtgtactctagactgggtgacagagcgagactctgtctgaaagaaaaaaaaaagagaggccagactcaaaataactgtaagatctcatccagcctcatgaccctgtcaaaagatatggcttcttttggtcttcatttttgttacaaaatgttccaagataggaaagaccttttaagtcccctgtttgtggcctctgaagaccttctctatctgaacacaaaaggtcaatggcaagcaaagcagctttttcatttatttatttttattttttaaaaatttttatttatgattttttgagatggagtcttgctctgtcataatcatataggtttgggattttatctttactcagtgactgaaagaatagcaacctttggttatggttatgtcagctcagatatttctaccctttgggaatgatattcgcatacacatgactagcactaaaaaaacctgaagagtttcttaagtgattacaggcatacctcattttactatgcttcactttatcgtgcttcacagattttgcttttcttttcttttttttttttaacaaattgaaggtttgtgtcaaccctgcactgagaaagtctgtgagtgccattttcccagcagcgtgtgctcattttgtgtctctgtgtcacattttggtgattcttatgatattttagatttcttcattattattatgacctgttatggtgatctacggttagtgatctttgatgttactattgtaattgttttgggacaccacgaattgcacccatatgatggcagacttaattgataaatgttgtgtgtgttctgccttctccactcactggccattcccgcatctctctccctctccttgggcctccctatttcctgagatccaacaatatttgaattaggccaattaataaccctgcaatggcctctaagtgttcaggtgaaaggaagactcacacatctctcactttaaatcaaaatgattgagcttagtgaggaaggcatgtagaaagctgaaattggacccaggtgcagtggctcacacttgtaatcccagcactttgggaggccagggtgggcggatcacttgaagtcaggagtccgagaccagcctgaccaacatggaggaaccccatctctactaaaaatacaaaattagccgggcatggtggtgcatgcctgtaatcccagctacttgggagcttgaggcaggagaatcgcttgaacccaggaagtggaggttgcactgagccgaggtagcgccattgcactccagcctgcaacaagagcgatactccgtctcaaaaaaaataagaaaaagaaatttgaattaggcctcctgggccagttagccaagttgtaaatgcaaaggaaaagttcttgaaggaaattacacacagtgagctaacaaatgataagaaaacaaagcagccttattgccaatgtaggggtcaagggaaaacttcccctttgccccctgaagttttgctgaaaaggcaactgacaaaaggcagattaatgagaaaaggcatccagatttattactgcacacggggaaaatcacagagtgattactccttaccccgatggggtagagaagcttatataccatcctgagattatagaaaaaatgaaggctcagaggatggccaaaaccaggttatggcaggaaatcaggttacgctggtaagacaggttatgggagggagggaagagaaggcctgtgtagcaaagatggtcttgttatatagatgaaatgaaattttagaggtaaatgtttctttcagacctttaaatgtgtcaaagtctcagttaatgtttcctagatccagcaagagaaggcccttagagaaagcctggctgtatcaatgtagattttctcttcaaatgcaaatgtaccccacaaaaggcagatttttagctatttttgtattttccagcccttttgaatagccatcttgaactatgtcaaagaaatatattttggggtaaaatattttggtttccttaacagatatggagaaggtttgagtggtcttgtccaaccagctacaacattgccttaagccaaaacacctaattcagagcaaagccctaactcccttcaattctatgaaggttgagagaggtgagaaagctgcagaagaaaagttggaagctagcagaggttggttcaaggggtttaaggaaaaaagccatctccataacataaaagtacaaggtgatgcagcaagtgctgatgtaggagctgcagcaagttacccagaagatctagctaagatcattgatgtaggtggctacactaacaacagattttcagtgtagaagaaacagccttctattggaagaagatgccacctaggattttcagagctaaagaagagaagtcaatgcctggcttcaaagcttcaaaggacaggctaactctcctgttaggagctagtatagctggtgactttaagttgaagccagtgctcattggccattctgaaaatcctagggtccttaaggattatgctgaatttattcttcctgtgctctataaatggaaaaacaaagcctggatgatagcacatctgtttacagcgtggtttactgaatattttaagcccactattgagaccgactgctcaaaaaaagattcatttcaaaatatcactgctaattgacagtgcacctagttacccaagaactctgaggaagatgtataaggagattaatttgttttcatgcataacaccatccattctgcagcccacggatcaaagagtaatttcaactttcaggtcttattgtttaagaaatacattttgtaagggtatagctgctctagatggtgattcctcagatgaatgtgggcaaagtaaactgaaaaccttctggaagggattcaccattctggatgccatcaagaacatttgcaattcgtgggaagaggttaaatatcaacactaatgggagtttggaagaagttgatttcatccttcatggatgactttgaggggttcaagacttcagtagaggaagtaactgcagacgtggtggaaatagcaagagaactagaattagaagtggagcctgaagaagtaactgaattgttgcaatctcatgatagaatttgaaaggatgaggagttgcttcctatgaatgagcaaataaatcgtttttttgagatagaatctactcctggtgaagattctcttgaaatggcaacaaagtattcagaatattatgtaagcttagttgataaagcagtggcagcctgtgagaggattgactccaattttgaaggaagttctaccatgcgtaaaatgctatcaaacagcatctcatgctacagagaaatctttcatgaaagaaagagtcaattgatatgaccaacttcattgttgtcttattttaataaattgccacagccaccccagactttagcaaccatcaccctgatttgtcagcagctattaacacaagactctccaccaggagaatgattacaactctctgaaggctcagaggatcattaacatttttagcaaaaaggtatttttaaattaagataggctgggcgcggtggctcaccctgtaatcccaacactttgggaggccgattgtttcagcccaggagtttgagatcagccttggcaacatggcgaaaccctctccctgctaaaaatacaaaaaattagctgggcatagtggtgcacacctgtagtaccagctactcaggaggctgaggtgggaggatcacctgagcctgggaagtcgaggctgcagtgagctgtgattgtatcagtgcactccaacctgggctataggagtgagaccctttctcaaaaaaaaaaaaagtttagataatattacattttaaagacataatgccattgcacacttcatagactacagtatagtgtaaacataacttttaaaatgcactgggaaaccaaaaaatttgtgtgactccgtttattacaatattcactttattgcagtagtctggaactgaacctgcaatgtttctcaggtatgcctgtatttttttcatcatgccttacaatgcatgctggcagatggaactcagaattttagaatttcttagaagccaaggagaatggtggcatgacttgtgtctttgacaatattttcagtgattctatacctttaggttattagggggactcgataaacattcccagggagctaatggtgagaaatgagccttggataaccagagagagaaagccactcaccctgcagacattttgtgcaaaagtgagagagattgatgaagattgttgaagattgtcgcatgtaccaaacacacaagttttattggcaaaataattctttttgctgtgtccttttttagcactctgaaacccacaaaaacactttaacacaggtttttagaaccccacagcttccaaaagtaattacttctgcgggaatcctgggccttattctatttccatgtggcactgggagtgatatttgcaaggaaaatagagtcactaggaaatggtctgcctttgttacagagcttatctccaacgtcattcttgaccttccattcaaggcatccagccctctctttggcatcactaagtatagaaccgtgtgacatgcgctcaaatgaaatcatcaggaggagcaggtgaaacttgtaaaactaatgcttgctggggctttgttgcctttcgtccatggctcccagagatttgtcaagtagtaattatttttcacaatgctcttggtgaggaaagtaagaatcattactcctgttttgcactctacattttcttgtacaaaccaagagaacagaatatgacttctcaatgaaagatgggaatgagagtttatagcctttagctccacaatgaaaaccatatggttagttatatcaacagaatcacctgaggagctttacaaatcacccatgactggatcccatcctcacagattctcatttaattggctttgagtcagatctgattattgaggggtgggtagttaaagctccccgtgattctaatgggctgtgaaggttgagaactattgagttagataattgtttggagctattttctttagggccccacctgcatatatcctgcaagtacctcaaactcaacatgtttaacctccccccaagcctgttccccctactatgtctcctatcttagtgacagcttcaccatccaaatggtggcctgtgaccaaaacctggatgccattcttgcttctctcttctccccttgtccattcagtcaccacgtcctgccaaatgtagctttcagttattgcttgaattcattcactcctcttctattccatcttgggtcaggacatttcaattctttcctctctcttgtcttactcccccataatctcccactctttagctagagtgaattattcaacttttctttggaaacccctttattaagatacaatttaccgcaaagcctcttgccaccaccagccaacacactccctcgtccagtccttccagagctggtcattcgatcatgcgctctctgacttttgcacatactcatccttcaacctggcacactgtttcttccacctctgcctccggaccttattacctcctttcagaagtcagcactgactcctatgacacatgagcataactgagtgccccttctttgtcctcccagagtaatttgtacttgcccctttcatacctgtgacaggtgaagctgaaatgtcaatatgggggccactgatgagaggcagtgggtgcagtgatgagaagaatctggtttgcaggagtctgagatttgggtcttggctttggtaagaaagctctgtgcacttgaactctgccacttcccctctgtaaaactgccttctcttctgaaaatgaggacattaaatctacattacctccaggttccttaaagccccagattctgtgactatgactgatagcacagaaatgaatgtgtgtgtatatatatatatatatatatatatatatatatatatatatatgtatgtattctcctcttgtaggcattagtttttcttctctttgattctgttctctgcaccctttcatcatgaccttatcttgctgaatccaccatttccttccttctttctggtttctttcccttctctctgctccctttttgcattctttttcaccttcccaccctcagctgctcctccctttccaattagtgcattccctcatctccagattgtttcttttgagtcttcctctccttggcctctttgagcctatttatcatagctttcttagtctttacgctagtggttgagcttatcctctcctttatgcattcttgtgtgtaattttgagcccaattccctatttgctacttcactgggctcctgaagcctgctccccattccttttggcgcatctagttctgcaaatcctctagctgtggcccccctgctgtctttggcaggaagcttggaagggggtggggacttctaggccacaaagccctgggaaattaagcagagcctctggatctcccttcctgacagctggacacagttctggcgataattggaccaccttagggatagagatgccccttgtccctccccatcccagaaatgccaaacacatagttttaacatctctcttcaaacagacaggtttttaggctggatggtggatgaattcggtttgatgcccccttcaccaatagatagagcaatatacggtggacccctagtgtccagaataaattactgcatcctcaggggtttggaggtcagttctcaaaattgtgctgtgtccaactctaagcaatgaggagaaagtagatgtataggtatggatatttgaaaatgttcttgttgaattatctgactgagcacagagtttagaaaagaggccatgaaaacacaaccgaaaaccttgcataattgccttctgtctaccgcagggtttctcagcctcagcactgttgacatattggactagataattcttcactgagagggcagttctgtgcaatgtaggatatttagtagcatccctagcctctgttcaccagatgccaatagcacttcagtcatcacaatcaaaattatcttcagatattgtcaaatgtcaccaggagtgactaaatcagcctctgtttagagccactgctctatcccaatcccccactccctgaacctctctggaatgcaggtcatggtaaaccccaatatctggccataatggggactgtgaaccaggtccaccatcactatcttcgtgtcttcctactaggtgtttcaaatcagctttctctcactcactcttgcctccctcttctctgctaacatttcaggtaaccaagttgtatttggaaagtggtgaaaggtacttggggtttgattagggggaggattgtaaaaccattacatgtttgactgaggaatgagattggctgtaagtatttgtgtcagtgactaggagagacacagctctgtaattgattatacttcaataccagatggaaaatatttaaacttatagaaaaaaaacaaaggttgccatgtttttcttttctttctttctttttttttttttttttttttgagacagagtcttactctgttgcccaggctggagtgcagtggcgagaccccggctcactgcaacctccgcctcccaggttcaagtgattctcctgcctcaacctcctgagtagctgggattacaggtgcccgccaccaggcctggctattttttatatttttagtagagacagggtttcaccatattggccaggctggtcttgaactcctgacttcatgatccacccacctcagcctctcaaagtactgggattacaggagtgagccaccatgcccgaccatgtttttctttttcattagtttcaccattcttcaaccctggcttacccctaacatttgtggggcccagagcaagaatacaaatggagagccatacatcatatttaaaagttacatgtgtaactaacaaactgctaaataaaatgtgtttgatccttctactttgacaactatgccttaatcacaaactggaaagccaggttcaaatatagacttctgggttctgcatcagaatatggtagtgtgtggagagttggcccttggcctttcaccaactctcccttctccttctatgcttggcctcttcctatgctatgtgggtcctctggattgatttgtgggcaccccaggctgcatggctgagctctctccacaacctctgcagaccctccctgcttggcccgccctcagaagtagggctgctctgagtgtgtggtccaccctggaaagacaggttgggagatgaagctctcccaggcctagcagcaagctcagagttgattgggcaggaaattctagagttctgggtaccctgattatgatcaaaagagtaggtgatgactctgggtgggtcttcccaccaagggtctccttgcctttatgagatagacacaaccaaagggggccagagttgggccatctaatgtgtgggacactatgaagatggttcttctgcaggtctccaggtgctcttcacacccaccctttcctgaagtcacattttcagctgagactgggaatagaaaagtgattgcttctaacctcagtgaaataaatcctcagtgagttaaaaaacggtggttcctctaaaaaaaaaaaattaaggtaaaaaacagaacataaaaattatcatcttaaccttcttgtaagtgtgcaactcagtaatgttaagcatattcacattgttgtgaaccaaatctccagaactttgtcatcttgcaaaatggaaactctacacccattaaacaactcccgcggtcaggcatggtggctcacgcttgtaatcccaacactttggaaggccgaagttggaggattgcttgagcccaggagttgagacctatctggttatcatagtgagaacctgtctctacaaaaaaaaaattttaaaattagccaggtgtggtggcatgcttgtagtcccagctacttgggaggttgaggtgggagaactgcataagccccggaggtagaggctgcagtgagctactgcatgccagcctggtgacagagtgagacctgcctcaaacaaaaacaaaaacaactcccctcttcttctttcctccagctcctggtaactaccatccttcctccagcccgtggtaactaccattgcactctctgtttctatgaattcgactagaattcatagaaatttagatacctcatataagtggaatcatgtaatatttgcttttttgtgactggcttatttcacttagcctaatgtcctcaaggttcagccatgttatagcatgtgacaggatttccttccttttaaaggatgaatgatcttcccttgtatgtgtataccacattttatttacccattcatccatctatgcacatttgggttgcttccacctcttggctatttgaatagtgctgctgtgaacatgaggatacaaatatttcttcaagactctttcatttcctttgaatatacacccataagtaggattgctggatcatatggtagttccatttttaattcactgaggaacctccatactgttttccatagtggttgcaccttttacaatcccactaacagtgtacaagggttccaatttttatttttctacatcctcaccaacaccaacacttgttttttttcttttttttttctgtgtgtgtgtgtgtgtgtctctgtcacccaggctgaagtgcagtgacgcaatcatggctcactgcagcctcaaccttcccaggctcaggtgatcctcccacctcagcctgctgagtagctgggactacaggcatgcaccaccatgccagattaatttttatattttatgaagagatggggttttaccatgttgcccaggctggtctcaaactctgggcttaagcaatccacccaacttggctcatgctgggattacaggcgtgagccactgtgcccagccattttctgttttttaatagtggccatcctaatggatgggagatgatatctcattgtagttttgatttgcatttctcataattaatgatgctgagcatcttacatgcttttggccatttgtagatcatctcaagttatgtctattcaagtcctttgcctatttcttaattgggttaatttttttgtcattgagttgtaggagtttttatatattctggatattaaccccttatcagaaaatatgattttcaaatattttctctttctataggttgctttttcactgttgtgttctttgatgcacatatgtttgaagtagttgcaattttttttgcttttgttgcccatgttttagatgtcatgtctaataaatcatttccaactccaatatcataaagctttttcccttatattttttgtaagagtttaatagttttatgtcttacttttaggtgtttcatccattttgagttaaattttgtatgtggtgtaagataagggtccaacttcattcctttgcatgtggatatccagttttcccaacattatttgttgaagagactgtcctttcccccattgagtggtcctggtacccttgtcaaagattatttttaaaaatagggttttagctaatagtctatgtttagccttagatgtgaatttggctacattttgctgcgctttggagatttccttttgttttaaaatcagatataattgaagaaggctgcttcttttgagaatttccatagaaattgtgcccaacaataattaactggaagaaaacaagttgtccgatttttcccccagggtctctaatttaggtcttcattggaaatagtctaagatacatcagactgtattaggaatgtactagcagcagttctcaagtatggcttacaaaactgagggtccccaagacctttctagagaatccccaagttcaaaactgtgttcataatactaagacattctttgcctttttctctgtgttgacatttgaattgctggtacaaaagcagtagtggttaaaactgctgtaactttagactcgagacaatgacaactatgtccatagtcactgcactattcatcatcatgcacttgcagtaaaagcaatgctagcttcacctaagagtgttcttgatgaagctgtaaaagcgattattaaatcttggcccttgagtccccgtctttttagtattccattacaaaagaggaagtacacattaaagtacttctgctacatataccaatgtacaatggttgtcttaaggaaaagtacttgcacagtggtttgtgctacaagcaatactagccactattttttttcatggatcaccatgtctacttgaaagcatgagtgataaactatggttattcagatatgactattcggcagatatttttcaaaatggacaaagggaacctgataattcaaggaaaacagctgaaagtattcattgccaatgataaatctaaggtttcaagcaaaatatttttggaaaatttttattcaccaccataagcttggcagattcccagtacttagaaaactttttgatgagactagtagtgatattaacacatgtgtgatgagactagtagtgatattaacacatgtgtgtgtttaaaaatcctgtaatgaaatatgtcaacacttggaagacttacaaactcagtgaactagtagtttctaattggccaatatacaatattgcaaaatcattcatgggtaaatgattcatccaaagcacagtgaactaatagtttctaattggccaatatgtaatattgcaaaatcattcatgggtaaatgattcatccaaagcacaatggatttttaatgtaacagagtatgagaagtgcattaatatggcttcccattccacagtccaacttaaacctttaagaaactgacacttgttgagttttggtgtagtatcagataagaatatccataattgtgcaaaaaggctatccaaatcctcttctcttttccagctacctacctatagttggacttcctttttatacttcagccaaaacaatgtattactacagattaaatgtagacatagatatgagaatccagctgtcttctattaagtcagatattaaaaagattgcaaatatgtaaaacaataccatacttccctacatttggggaggaaaatgcttatttttcactaaaaatgttatatatgttaacaggcaataggtttattaatgttagctttagatggattgataaacatttttaaaggttctcagtttaaatttctaatatgaaaagtaatgatagctataacccacaaaaatgaaagctcatggtggggggtactcaataattttttaagagcataacgggttctagagaccaaaaagtttgagaaatactgtgccagaaatactaaagaactgaaggcagttctttaactgtaacccgagattggtctaaaaggagaaaacttttcagataaaatagaaatcacaattaatcattagcaatcataacaatgttctttctagatggtgatggaaagtggggactggctggttggtggagaccttcaggtgctggagaaaataagatggaatgatgggctggaccaataccgtctgacacctctggagctcaaacagaaatgtaaagaaatgaatgctggtatgtaaactgttcttagtgcattttatttatttatttattgagatggtgtcttgttctgtcacccaggctggagtgcaatggcacgatctcagctcactgcaacctctgcctcccaggttcaagtaattctcctgcctcagcctcctgagtagcttggattacaggtgcccaccaccacgcccagctaatttttgtatttttagtagagacagggtttcaacatgttggtcaggctggtctcaaactcctgacctcaggtgatccccctaccttggcctcccaaagtgctgggattacagatgtgagccactgcacccggcccctagtgcatttattaatattcccttaccaccctctgattaaagaattaaggataccaggagtcagcattttcttttttaagagacaggtctcaccctgtcacccaggctggagtgcagtggcatgaccatagctcactgcagcctcaacctcctgggctcaagtaattctccaaccttaacctcacaagtagctgggactacaaggcacatgccaccatactctgctaatttttatatttttttgtagaaatgggtctcactatgttttccaggctggtcttgaactcctgggctcaagcaatctccccgcctcagcctcccaaagtgctgggattacaggcatgagccaccatcatgcctggcttcagcatttttatagttaaaaataacctgaaaacatcttctattggtatgtctataatatggaaacagttttataaagttgtactatatattagaaccatatattagaacactattcaacagtttaaaatattcactgatagagatagctgaagtgtatttatgaagtgaaaaagcaaattgcagaacaatatgtagagcataatcatgttctggaaaacaaaataaaatatcatcataattctaaaatccctaacctacttctgtgcatagtggcagaaaagtctctggcagcacatgccccaaactgcagattacagtggctacctcttggggatggagtttggactaagagatttttactctttattgtatacattttgaaaaagagggagaaaaagtaataataggattggtgatttttatattctattttgggcttttctgtatttctcaagtttttcattataatattgaaagtattcattttcaatactatagacataaaaattatttcattatcagaaaaaaaaattaaggctctcaggagtccaccactaagtggagtagttttggagatttctttaaagcgaaagcaaaatttttttatatctttagattgttgccccttgcacaggccccagaaaacatttgttacaattattcacctccctctaggcttcctggtacaagaggactaattaacactggccctgcctgagccttggtgtacaggaaaggtcctggcaacaaatcttttcattcctgagttaggctgtccctaagcagcttcctgcctctgcatctcatccctgtctcagctatctggtgttggttagtgctggattaacacctctaaagacccaggtgtattctccagctgattatcagaagccagtggataggctgggtgcagtggcttacgcctgtaatcccaacactttgggaggctgaggcaggcggatcacttgaggtcaggagttcgagaccagcctggccaacatggtgaaaccctgagtctactaaaaatacaaaaattagccgggtgtggtggcacacgcctgtaatcccagctactcaggaggctgaggcaggagaatcgcttgaatcctggaggcggaggttgcagtgacctgagatcgctgactgcactccagcctgggcaacagagtgagactctttcaaaaaaaaaaaaaaaaagccagtggataatgaatgcacagaacaataaacatagctgtgtcctttctgttcttgtggagaaatgacaccatgtgtttctgtgaccttccttcttctgctttcctctcccagatgcggtgtttgcattccagttgcgcaatcctgtccacaatggccatgccctgttgatgcaggacactcgccgcaggctcctagagaggggctacaagcacccggtcctcctactacaccctctgggcggctggaccaaggatgacgatgtgcctctagactggcggatgaagcagcacgcggctgtgctcgaggaaggggtcctggatcccaagtcaaccattgttgccatctttccgtctcccatgttatatgctggccccacagaggtgagcaattcccagagctgggctttgagactcaggaattcagactcagactttacatagaagagtaaatgagtctctgggatcctttctgtttcctcatgagcagattctggaatgttctggtgtctcttctttatctagcttaattatgtttccacttagtatttgaaaagtgctagaaggccaggcgcagtggctgtcacctgtaatcccagcactttgggaggccgaggtgggcagatcacaaggtcaggagttcgaggccacctgaccaacatgatgaaaccctgtctctactaaaaatacaaaaattagctgggcatggtggcatgcccctgtaatcccagctactcgggaagctgaggcaggagaatcgcttgaacctgggaggtggaggttgcagtgagccgagatcatgccactgcactccagcctgggcaacagagcgagacttggtctcaaaaaaaaaaagaaagatgctagaaacatcaaatcaaacctattatacattgcctttgagaatatggaagttggcaagtgaatgaggtggctaatgaaacttaactgggtgatagggcaagttgtatgtaacctaatattcaatttcagaagttccagttactctccatgccctgtgagcttcattaggaaaggatatctttaaaagataaatgtcacccttttatcataacacagtgagcttatcaaacagagattttctttgtcccactgcaccaccagtgtagtggatttgaacgagctggctgcaagtatgatgaatagaaagggtctcaaccctttggaatgccccaaactgagtttaatgaattaattctcttcaatcagataaaagttccaggcccctagctctcctttccatcctttgtattgctatctgagctttaaagagggtaagtgttatgttgaactgaaatcagcatttgcatgtgaaaggtaattagctcattaatggcagtcagataatgagatactggagttggtaatttcctttaaactgcaatttattgtgaatagggaggcactggaaagtaaaatccacatagttctgtagaatagtaagatttgagtgttcttgtccggctagcctgtttggagaagagatgaggaaatacaaccttgagttatgagggaggaatcttatctttagagctcctatcctacctaatataacaaagcatgaagagtgcacggagtcttagaacctcagtgattttcttgcaattcttagttgactcacattgctgaattacttttaaagtagaataaaggtgtctccataaaccatgacctacagatttgacccacaatgaccagcatgtcccttatggacattttctaggtccagtggcactgcaggtcccggatgattgcgggtgccaatttctacattgtggggagggaccctgcaggaatgccccatcctgaaaccaagaaggatctgtatgaacccactcatgggggcaaggtcttgagcatggcccctggcctcacctctgtggaaatcattccattccgagtggctgcctacaacaaagccaaaaaagccatggacttctatgatccagcaaggtaggttttcagaggaaaattcttttatcaacatctgtataaaagaaatgatgaggcagaatttgggccctttgaaaaactctccagtgcattgccacatgctcccaagtggactgagtcccttgagagtcaagacgtggtcttataaattttatgtcccctaaaattgtactacagtcttctgcatatagtagatggtccataaatatttctctttcaacatgcattcttgagcatgcacagagtgcctggcacactaagtgaaaggaagcaacatagaaagagattgcaatgaatatttatggtgcacttgctcctcatgctgagggttcacagaagtaggcagagaaacagaagacagactctgggctcaagacacttcccaggaacagtataggcgcatggcaaatactaaatggatagctgccattatttcccttctcttctgcaagttcctgaagatttagaggactgcccacttttgaagatgcagcattttacagaaagaacatgggtctcaaaaaccataacctactccaggaatccttaaggcagatatcatttacctacactgagttctttgttgccaccctgtaacaggcacaatgagtttgacttcatctcaggaactcgaatgaggaagctcgcccgggaaggagagaatcccccagatggcttcatggcccccaaagcatggaaggtcctgacagattattacaggtccctggagaagaactaagcctttggctccagagtttctttctgaagtgctctttgattaccttttctatttttatgattagatgctttgtattaaattgcttctcaatgatgcattttaatcttttataatgaagtaaaagttgtgtctataattaaaaaaatatatatatatatacacacacacatatacatacaaagtcaaactgaagaccaaatcttagcaggtaaaagcaatattcttatacatttcataataaaattagctctatgtattttctactgcacctgagcaggcaggtcccagatttcttaaggctttgtttgaccatgtgtctagttacttgctgaaaagtgaatatattttccagcatgtcttgacaacctgtactcttccaatgtcatttatcagttgtaaaatatatcagattgtgtcctcttctgtacaattgaccaaaaaaaaaaaatttttttttctcactctaaaagaggtgtggctcacatcaagattcttcctgatattttacctcatgctgtacaaagccttaatgttgtaatcatatcttacgtgttgaagacctgactggagaaacaaaatgtgcaataacgtgaattttatcttagagatctgtgcagcctatttctgtcacaaaagttatattgtctaataagagaagtcttaatggcctctgtgaataatgtaactccagttacacggtgacttttaatagcatacagtgatttgatgaaaggacgtcaaacaatgtggcgatgtcgtggaaagttatctttcccgctctttgctgtggtcattgtgtcttgcagaaaggatggccctgatgcagcagcagcgccagctgtaataaaaaataattcacactatcagactagcaaggcactagaactggaaaagaccacagaaaacaaagaatccaaccctttcatcttacaggtgaacaaactgtgatgatgcacatgtatgtgttttgtaagctgtgagcaccgtaacaaaatgtaaatttgccattattaggaagtgctggtggcagtgaagaagcacccaggccacttgactcccagtctggtgccctgtctacaccagacaacacaggagctgggtcagattcccctcagctgcttaacaaagttcctcgaacagaaagtgcttacaaagctgccttctcggatactgaaaggtcgagttttctgaactgcactgattttattgcagttgaaaaaaaaaaaaagctattccaaagatttcaagctgttctgagacatcttctgatggctttacttcctgagaggcaatgtttttactttatgcataattcattgttgccaaggaataaagtgaagaaacagcaccttttaatatataggtctctctggaagagacctaaattagaaagagaaaactgtgacaattttcatattctcattcttaaaaaacactaatcttaactaacaaaagttcttttgagaataagttacacacaatggccacagcagtttgtctttaatagtatagtgcctatactcatgtaatcggttactcactactgcctttaaaaaaaaaaaacagcatatttattgaaaacatgagacaggattatagtgccttaaccgatatattttgtgacttaaaaaatacatttaaaactgctcttctgctctagtaccatgcttagtgcaaatgattatttctatgtacaactgatgcttgttcttattttaataaatttatcagagtgaa

SEQ ID NO: 33 - DNA, 3937 bp, Homo sapiens
gtgccgggcgtgccatctgccgctccgctgcaaggtctcgcccgggaccggggctggcggagcgcgcgcccgcgagtaggggccgggccggggaccccgcctaggcggcggcggccgggtccccaaggctgggcgctgcttgcggaaccgacggggcggagaggagcgtggcgggaggaggagtaggagaagggggctggtcaagggaagtgcgacgtgtctgcggagcctttttatacctccttcccgggagtccggcagccgctgctgctgctgctgctgctgctgctgccgccgccgccgccgccgtccctgcgtccttcggtctctgctcccgggacccgggctccgccgcagccagccagcatgtcggggatcaagaagcaaaagacggagaaccagcagaaatccaccaatgtagtctatcaggcccaccatgtgagcaggaataagagagggcaagtggttggaacaaggggtgggttccgaggatgtaccgtgtggctaacaggtctctctggtgctggaaaaacaacgataagttttgccctggaggagtaccttgtctcccatgccatcccttgttactccctggatggggacaatgtccgtcatggccttaacagaaatctcggattctctcctggggacagagaggaaaatatccgccggattgctgaggtggctaagctgtttgctgatgctggtctggtctgcattaccagctttatttctccattcgcaaaggatcgtgagaatgcccgcaaaatacatgaatcagcagggctgccattctttgaaatatttgtagatgcacctctaaatatttgtgaaagcagagacgtaaaaggcctctataaaagggccagagctggggagattaaaggatttacaggtattgattctgattatgagaaacctgaaactcctgagcgtgtgcttaaaaccaatttgtccacagtgagtgactgtgtccaccaggtagtggaacttctgcaagagcagaacattgtaccctatactataatcaaagatatccacgaactctttgtgccggaaaacaaacttgaccacgtccgagctgaggctgaaactctcccttcattatcaattactaagctggatctccagtgggtccaggttttgagcgaaggctgggccactcccctcaaaggtttcatgcgggagaaggagtacttacaggttatgcactttgacaccctgctagatgcacatggctctttccacagatggcgtgatcaacatgagcatccccattgtactgcccgtctctgcagaggataagacacggctggaagggtgcagcaagtttgtcctggcacatggtggacggagggtagctatcttacgagacgctgaattctatgaacacagaaaagaggaacgctgttcccgtgtttgggggacaacatgtacaaaacacccccatatcaaaatggtgatggaaagtggggactggctggttggtggagaccttcaggtgctggagaaaataagatggaatgatgggctggaccaataccgtctgacacctctggagctcaaacagaaatgtaaagaaatgaatgctgatgcggtgtttgcattccagttgcgcaatcctgtccacaatggccatgccctgttgatgcaggacactcgccgcaggctcctagagaggggctacaagcacccggtcctcctactacaccctctgggcggctggaccaaggatgacgatgtgcctctagactggcggatgaagcagcacgcggctgtgctcgaggaaggggtcctggatcccaagtcaaccattgttgccatctttccgtctcccatgttatatgctggccccacagaggtccagtggcactgcaggtcccggatgattgcgggtgccaatttctacattgtggggagggaccctgcaggaatgccccatcctgaaaccaagaaggatctgtatgaacccactcatgggggcaaggtcttgagcatggcccctggcctcacctctgtggaaatcattccattccgagtggctgcctacaacaaagccaaaaaagccatggacttctatgatccagcaagttctttgttgccaccctgtaacaggcacaatgagtttgacttcatctcaggaactcgaatgaggaagctcgcccgggaaggagagaatcccccagatggcttcatggcccccaaagcatggaaggtcctgacagattattacaggtccctggagaagaactaagcctttggctccagagtttctttctgaagtgctctttgattaccttttctatttttatgattagatgctttgtattaaattgcttctcaatgatgcattttaatcttttataatgaagtaaaagttgtgtctataattaaaaaaatatatatatatatacacacacacatatacatacaaagtcaaactgaagaccaaatcttagcaggtaaaagcaatattcttatacatttcataataaaattagctctatgtattttctactgcacctgagcaggcaggtcccagatttcttaaggctttgtttgaccatgtgtctagttacttgctgaaaagtgaatatattttccagcatgtcttgacaacctgtactcttccaatgtcatttatcagttgtaaaatatatcagattgtgtcctcttctgtacaattgacattcttcctgatattttacctcatgctgtacaaagccttaatgttgtaatcatatcttacgtgttgaagacctgactggagaaacaaaatgtgcaataacgtgaattttatcttagagatctgtgcagcctatttctgtcacaaaagttatattgtctaataagagaagtcttaatggcctctgtgaataatgtaactccagttacacggtgacttttaatagcatacagtgatttgatgaaaggacgtcaaacaatgtggcgatgtcgtggaaagttatctttcccgctctttgctgtggtcattgtgtcttgcagaaaggatggccctgatgcagcagcagcgccagctgtaataaaaaataattcacactatcagactagcaaggcactagaactggaaaagaccacagaaaacaaagaatccaaccctttcatcttacaggtgaacaaactgtgatgatgcacatgtatgtgttttgtaagctgtgagcaccgtaacaaaatgtaaatttgccattattaggaagtgctggtggcagtgaagaagcacccaggccacttgactcccagtctggtgccctgtctacaccagacaacacaggagctgggtcagattcccctcagctgcttaacaaagttcctcgaacagaaagtgcttacaaagctgccttctcggatactgaaaggtcgagttttctgaactgcactgattttattgcagttgaaaaaaaaaaaaagctattccaaagatttcaagctgttctgagacatcttctgatggctttacttcctgagaggcaatgtttttactttatgcataattcattgttgccaaggaataaagtgaagaaacagcaccttttaatatataggtctctctggaagagacctaaattagaaagagaaaactgtgacaattttcatattctcattcttaaaaaacactaatcttaactaacaaaagttcttttgagaataagttacacacaatggccacagcagtttgtctttaatagtatagtgcctatactcatgtaatcggttactcactactgcctttaaaaaaaaaaaacagcatatttattgaaaacatgagacaggattatagtgccttaaccgatatattttgtgacttaaaaaatacatttaaaactgctcttctgctctagtaccatgcttagtgcaaatgattatttctatgtacaactgatgcttgttcttattttaataaatttatcagagtgaa

SEQ ID NO: 34 - protein, 341 aa, Homo sapiens [sequence omitted]

SEQ ID NO: 35 - DNA, 3930 bp, Homo sapiens
ggccgcgtgccgggcgtgccatctgccgctccgctgcaaggtctcgcccgggaccggggctggcggagcgcgcgcccgcgagtaggggccgggccggggaccccgcctaggcggcggcggccgggtccccaaggctgggcgctgcttgcggaaccgacggggcggagaggagcgtggcgggaggaggagtaggagaagggggctggtcaagggaagtgcgacgtgtctgcggagcctttttatacctccttcccgggagtccggcagccgctgctgctgctgctgctgctgctgctgccgccgccgccgccgccgtccctgcgtccttcggtctctgctcccgggacccgggctccgccgcagccagccagcatgtcggggatcaagaagcaaaagacggagaaccagcagaaatccaccaatgtagtctatcaggcccaccatgtgagcaggaataagagagggcaagtggttggaacaaggggtgggttccgaggatgtaccgtgtggctaacaggtctctctggtgctggaaaaacaacgataagttttgccctggaggagtaccttgtctcccatgccatcccttgttactccctggatggggacaatgtccgtcatggccttaacagaaatctcggattctctcctggggacagagaggaaaatatccgccggattgctgaggtggctaagctgtttgctgatgctggtctggtctgcattaccagctttatttctccattcgcaaaggatcgtgagaatgcccgcaaaatacatgaatcagcagggctgccattctttgaaatatttgtagatgcacctctaaatatttgtgaaagcagagacgtaaaaggcctctataaaagggccagagctggggagattaaaggatttacaggtattgattctgattatgagaaacctgaaactcctgagcgtgtgcttaaaaccaatttgtccacagtgagtgactgtgtccaccaggtagtggaacttctgcaagagcagaacattgtaccctatactataatcaaagatatccacgaactctttgtgccggaaaacaaacttgaccacgtccgagctgaggctgaaactctcccttcattatcaattactaagctggatctccagtgggtccaggttttgagcgaaggctgggccactcccctcaaaggtttcatgcgggagaaggagtacttacaggttatgcactttgacaccctgctagatgttttcgtgcatcacatggctctttccacagatggcgtgatcaacatgagcatccccattgtactgcccgtctctgcagaggataagacacggctggaagggtgcagcaagtttgtcctggcacatggtggacggagggtagctatcttacgagacgctgaattctatgaacacagaaaagaggaacgctgttcccgtgtttgggggacaacatgtacaaaacacccccatatcaaaatggtgatggaaagtggggactggctggttggtggagaccttcaggtgctggagaaaataagatggaatgatgggctggaccaataccgtctgacacctctggagctcaaacagaaatgtaaagaaatgaatgctgatgcggtgtttgcattccagttgcgcaatcctgtccacaatggccatgccctgttgatgcaggacactcgccgcaggctcctagagaggggctacaagcacccggtcctcctactacaccctctgggcggctggaccaaggatgacgatgtgcctctagactggcggatgaagcagcacgcggctgtgctcgaggaaggggtcctggatcccaagtcaaccattgttgccatctttccgtctcccatgttatatgctggccccacagaggtccagtggcactgcaggtcccggatgattgcgggtgccaatttctacattgtggggagggaccctgcaggaatgccccatcctgaaaccaagaaggatctgtatgaacccactcatgggggcaaggtcttgagcatggcccctggcctcacctctgtggaaatcattccattccgagtggctgcctacaacaaagccaaaaaagccatggacttctatgatccagcaaggcacaatgagtttgacttcatctcaggaactcgaatgaggaagctcgcccgggaaggagagaatcccccagatggcttcatggcccccaaagcatggaaggtcctgacagattattacaggtccctggagaagaactaagcctttggctccagagtttctttctgaagtgctctttgattaccttttctatttttatgattagatgctttgtattaaattgcttctcaatgatgcattttaatcttttataatgaagtaaaagttgtgtctataattaaaaaaatatatatatatatacacacacacatatacatacaaagtcaaactgaagaccaaatcttagcaggtaaaagcaatattcttatacatttcataataaaattagctctatgtattttctactgcacctgagcaggcaggtcccagatttcttaaggctttgtttgaccatgtgtctagttacttgctgaaaagtgaatatattttccagcatgtcttgacaacctgtactcttccaatgtcatttatcagttgtaaaatatatcagattgtgtcctcttctgtacaattgacattcttcctgatattttacctcatgctgtacaaagccttaatgttgtaatcatatcttacgtgttgaagacctgactggagaaacaaaatgtgcaataacgtgaattttatcttagagatctgtgcagcctatttctgtcacaaaagttatattgtctaataagagaagtcttaatggcctctgtgaataatgtaactccagttacacggtgacttttaatagcatacagtgatttgatgaaaggacgtcaaacaatgtggcgatgtcgtggaaagttatctttcccgctctttgctgtggtcattgtgtcttgcagaaaggatggccctgatgcagcagcagcgccagctgtaataaaaaataattcacactatcagactagcaaggcactagaactggaaaagaccacagaaaacaaagaatccaaccctttcatcttacaggtgaacaaactgtgatgatgcacatgtatgtgttttgtaagctgtgagcaccgtaacaaaatgtaaatttgccattattaggaagtgctggtggcagtgaagaagcacccaggccacttgactcccagtctggtgccctgtctacaccagacaacacaggagctgggtcagattcccctcagctgcttaacaaagttcctcgaacagaaagtgcttacaaagctgccttctcggatactgaaaggtcgagttttctgaactgcactgattttattgcagttgaaaaaaaaaaaaagctattccaaagatttcaagctgttctgagacatcttctgatggctttacttcctgagaggcaatgtttttactttatgcataattcattgttgccaaggaataaagtgaagaaacagcaccttttaatatataggtctctctggaagagacctaaattagaaagagaaaactgtgacaattttcatattctcattcttaaaaaacactaatcttaactaacaaaagttcttttgagaataagttacacacaatggccacagcagtttgtctttaatagtatagtgcctatactcatgtaatcggttactcactactgcctttaaaaaaaaaaaacagcatatttattgaaaacatgagacaggattatagtgccttaaccgatatattttgtgacttaaaaaatacatttaaaactgctcttctgctctagtaccatgcttagtgcaaatgattatttctatgtacaactgatgcttgttcttattttaataaatttatcagagtgaa

SEQ ID NO: 36 - protein, 618 aa, Homo sapiens
MSGIKKQKTENQQKSTNVVYQAHHVSRNKRGQVVGTRGGFRGCTVWLTGLSGAGKTTISFALEEYLVSHAIPCLDGDNVRHQRNLGFSPGDREENIRRIAEVAKLFADAGLVCITSFISPFAKDRENARKIHESAGLPFFEIFVDAPLNICESRDVKGKRARAGEIKGFTGIDSDYEKPETPERVLKTNLSTVSDCVHQVVELLQEQNIVPYTIIKDIHELFVPENKLDHVRAEAETLPSLSITKLDLQWVQVLSEGWATPLKGFMREKEYLQVMHFDTLLDVFVHHMALSTDGVINMSIPIVLPVSAEDKTRLEGCSKFVLAHGGRRVAILRDAEFYEHRKEERCSRVWGTTCTKHPHIKMVMESGDWLVGGDLQVLEKIRWNDGLDQYRLTPLELKQKCKEMNADAVFAFQLRNPVHNGHALLMQDTRRRLLERGYKHPVLLLHPLGGWTKDDDVPLDWRMKQHAAVLEEGVLDPKSTIVAIFPSPMLYAGPTEVQWHCRSRMIAGANFYIVGRDPAGMPHPETKKDLYEPTHGGKVLSMAPGLTSVEIIPFRVAAYNKAKKAMDFYDPARHNEFDFISGTRMRKLAREGENPPDGFMAPKAWKVLTDYYRSLEKN

SEQ ID NO: 37 - DNA, 3954 bp, Homo sapiens
ggccgcgtgccgggcgtgccatctgccgctccgctgcaaggtctcgcccgggaccggggctggcggagcgcgcgcccgcgagtaggggccgggccggggaccccgcctaggcggcggcggccgggtccccaaggctgggcgctgcttgcggaaccgacggggcggagaggagcgtggcgggaggaggagtaggagaagggggctggtcaagggaagtgcgacgtgtctgcggagcctttttatacctccttcccgggagtccggcagccgctgctgctgctgctgctgctgctgctgccgccgccgccgccgccgtccctgcgtccttcggtctctgctcccgggacccgggctccgccgcagccagccagcatgtcggggatcaagaagcaaaagacggagaaccagcagaaatccaccaatgtagtctatcaggcccaccatgtgagcaggaataagagagggcaagtggttggaacaaggggtgggttccgaggatgtaccgtgtggctaacaggtctctctggtgctggaaaaacaacgataagttttgccctggaggagtaccttgtctcccatgccatcccttgttactccctggatggggacaatgtccgtcatggccttaacagaaatctcggattctctcctggggacagagaggaaaatatccgccggattgctgaggtggctaagctgtttgctgatgctggtctggtctgcattaccagctttatttctccattcgcaaaggatcgtgagaatgcccgcaaaatacatgaatcagcagggctgccattctttgaaatatttgtagatgcacctctaaatatttgtgaaagcagagacgtaaaaggcctctataaaagggccagagctggggagattaaaggatttacaggtattgattctgattatgagaaacctgaaactcctgagcgtgtgcttaaaaccaatttgtccacagtgagtgactgtgtccaccaggtagtggaacttctgcaagagcagaacattgtaccctatactataatcaaagatatccacgaactctttgtgccggaaaacaaacttgaccacgtccgagctgaggctgaaactctcccttcattatcaattactaagctggatctccagtgggtccaggttttgagcgaaggctgggccactcccctcaaaggtttcatgcgggagaaggagtacttacaggttatgcactttgacaccctgctagatgatggcgtgatcaacatgagcatccccattgtactgcccgtctctgcagaggataagacacggctggaagggtgcagcaagtttgtcctggcacatggtggacggagggtagctatcttacgagacgctgaattctatgaacacagaaaagaggaacgctgttcccgtgtttgggggacaacatgtacaaaacacccccatatcaaaatggtgatggaaagtggggactggctggttggtggagaccttcaggtgctggagaaaataagatggaatgatgggctggaccaataccgtctgacacctctggagctcaaacagaaatgtaaagaaatgaatgctgatgcggtgtttgcattccagttgcgcaatcctgtccacaatggccatgccctgttgatgcaggacactcgccgcaggctcctagagaggggctacaagcacccggtcctcctactacaccctctgggcggctggaccaaggatgacgatgtgcctctagactggcggatgaagcagcacgcggctgtgctcgaggaaggggtcctggatcccaagtcaaccattgttgccatctttccgtctcccatgttatatgctggccccacagaggtccagtggcactgcaggtcccggatgattgcgggtgccaatttctacattgtggggagggaccctgcaggaatgccccatcctgaaaccaagaaggatctgtatgaacccactcatgggggcaaggtcttgagcatggcccctggcctcacctctgtggaaatcattccattccgagtggctgcctacaacaaagccaaaaaagccatggacttctatgatccagcaaggcacaatgagtttgacttcatctcaggaactcgaatgaggaagctcgcccgggaaggagagaatcccccagatggcttcatggcccccaaagcatggaaggtcctgacagattattacaggtccctggagaagaactaagcctttggctccagagtttctttctgaagtgctctttgattaccttttctatttttatgattagatgctttgtattaaattgcttctcaatgatgcattttaatcttttataatgaagtaaaagttgtgtctataattaaaaaaatatatatatatatacacacacacatatacatacaaagtcaaactgaagaccaaatcttagcaggtaaaagcaatattcttatacatttcataataaaattagctctatgtattttctactgcacctgagcaggcaggtcccagatttcttaaggctttgtttgaccatgtgtctagttacttgctgaaaagtgaatatattttccagcatgtcttgacaacctgtactcttccaatgtcatttatcagttgtaaaatatatcagattgtgtcctcttctgtacaattgaccaaaaaaaaaaaatttttttttctcactctaaaagaggtgtggctcacatcaagattcttcctgatattttacctcatgctgtacaaagccttaatgttgtaatcatatcttacgtgttgaagacctgactggagaaacaaaatgtgcaataacgtgaattttatcttagagatctgtgcagcctatttctgtcacaaaagttatattgtctaataagagaagtcttaatggcctctgtgaataatgtaactccagttacacggtgacttttaatagcatacagtgatttgatgaaaggacgtcaaacaatgtggcgatgtcgtggaaagttatctttcccgctctttgctgtggtcattgtgtcttgcagaaaggatggccctgatgcagcagcagcgccagctgtaataaaaaataattcacactatcagactagcaaggcactagaactggaaaagaccacagaaaacaaagaatccaaccctttcatcttacaggtgaacaaactgtgatgatgcacatgtatgtgttttgtaagctgtgagcaccgtaacaaaatgtaaatttgccattattaggaagtgctggtggcagtgaagaagcacccaggccacttgactcccagtctggtgccctgtctacaccagacaacacaggagctgggtcagattcccctcagctgcttaacaaagttcctcgaacagaaagtgcttacaaagctgccttctcggatactgaaaggtcgagttttctgaactgcactgattttattgcagttgaaaaaaaaaaaaagctattccaaagatttcaagctgttctgagacatcttctgatggctttacttcctgagaggcaatgtttttactttatgcataattcattgttgccaaggaataaagtgaagaaacagcaccttttaatatataggtctctctggaagagacctaaattagaaagagaaaactgtgacaattttcatattctcattcttaaaaaacactaatcttaactaacaaaagttcttttgagaataagttacacacaatggccacagcagtttgtctttaatagtatagtgcctatactcatgtaatcggttactcactactgcctttaaaaaaaaaaaacagcatatttattgaaaacatgagacaggattatagtgccttaaccgatatattttgtgacttaaaaaatacatttaaaactgctcttctgctctagtaccatgcttagtgcaaatgattatttctatgtacaactgatgcttgttcttattttaataaatttatcagagtgaa

SEQ ID NO: 38 - protein, 608 aa, Homo sapiens
MSGIKKQKTENQQKSTNVVYQAHHVSRNKRGQVVGTRGGFRGCTVWLTGLSGAGKTTISFALEEYLVSHAIPCLDGDNVRHQRNLGFSPGDREENIRRIAEVAKLFADAGLVCITSFISPFAKDRENARKIHESAGLPFFEIFVDAPLNICESRDVKGKRARAGEIKGFTGIDSDYEKPETPERVLKTNLSTVSDCVHQVVELLQEQNIVPYTIIKDIHELFVPENKLDHVRAEAETLPSLSITKLDLQWVQVLSEGWATPLKGFMREKEYLQVMHFDTLLDDGVINMSIPIVLPVSAEDKTRLEGCSKFVLAHGGRRVAILRDAEFYEHRKEERCSRVWGTTCTKHPHIKMVMESGDWLVGGDLQVLEKIRWNDGLDQYRLTPLELKQKCKEMNADAVFAFQLRNPVHNGHALLMQDTRRRLLERGYKHPVLLLHPLGGWTKDDDVPLDWRMKQHAAVLEEGVLDPKSTIVAIFPSPMLYAGPTEVQWHCRSRMIAGANFYIVGRDPAGMPHPETKKDLYEPTHGGKVLSMAPGLTSVEIIPFRVAAYNKAKKAMDFYDPARHNEFDFISGTRMRKLAREGENPPDGFMAPKAWKVLTDYYRSLEKN

SEQ ID NO: 39 - DNA, 3668 bp, Mus musculus
gcggggttcggagctagggcggcggcggcaggtggcgcgggaggctgaagcgtgccatggggctcccggcgctgctggccagtgcgctctgcaccttcgtgctgccgctgctgctcttcctggcggcgctcaagctctgggacctgtactgtgtgagcagccgcgatcgcagctgcgccctccccttgccccccggtaccatgggcttcccattctttggggaaacattgcagatggtgcttcaggtaagggagctcgggaagggacctgacgcttcccccggagtccgcctcagctctgggcctgggctgaaggtgggataagtgtcctcgcgagggaggcgaccacggcttggaagaggggctagacggagaccagatgctccccggcgccccctcatgcgggttgcgggtctctctcctccacctccctctcagcggaggaagtttctgcagatgaagcgcaggaaatacggcttcatctacaagacgcatctgtttgggcggcccacggtgcgggtgatgggcgcggataatgtgcggcgcatcttgctgggagagcaccggttggtgtcggtgcactggcccgcgtcggtgcgcaccatcctgggcgctggctgcctctccaacctgcacgattcctcgcacaagcagcgaaagaaggtgagggtgagctggcaactccttggctggcagggagacctcatcctatggcttggttcaggcaaatagatgcggggcgagggctagtcctatgtggtggggaccaggaccctctctatctgagatccactttagcttttctgctagcacgtgggttagtcctggggggactgaaattcttgaaagggtactcggaaaggcgaagggggggggctgagggaaagtagaggattgtaacactctctgctcctggggggtgctcaggtgattatgcaggccttcagccgcgaggcactccagtgctacgtgcccgtgatcgctgaggaagtcagcagttgtctggagcagtggctaagctgcggcgagcgcggcctcctggtctaccccgaggtgaagcgcctcatgttccgcatcgccatgcgcatcctgctgggctgcgagccgggtccagcgggcggcggggaggacgagcagcagctcgtggaggctttcgaggagatgacccgcaatctcttctctcttcccattgacgtgccctttagcggcctgtaccgggtaagggcggtttgcggagtcggagtaggggaacgcaagctcgggcatccgctcaccgccacgctctctccgcgctcagggcgtgaaggcgcggaaccttatacacgcgcgcatcgaggagaacattcgcgccaagatccgccggcttcaggctacagagccggatgggggttgcaaggacgcgctgcagctcctgattgagcactcgtgggagaggggagagaggctggatatgcaggtgagaagcaatttcaaaaggtgccaagggccggggagtgcctctgactttccagacacactttctgggggtctccaaagccctgtcaaggccccagctacttccaagtgggcggcgatgctaggtctagagcttttcaacctgtgggtcgtgaccccttcacggagccaaacaaccctttcagaagggtcgcctaagagcatctgcatatccgatatttacatcaagaaacataacagtagcaaaattaccgttatgaagtagcaacaaagataattttatcgttgggggtcaccacaacacgaggaaccgtattaaagggtggcattggtctagagagctgtggaagggggtggctgagcaatggggaagatcccaaagttcaaagggcaaggctcatctacaaaggttaaagcggaagagcaggattaagggagttttgcgtttttgtttgtggtctttgactttctatgaacaaaacggattttacccttgaagtcttccgtgcaatattctcaggtcaggtctttgtaacagtgctataaactgcactcagatctgtataaacttccgtttttatccttaggcactaaaacaatcgtcaacagagctcctctttggtggtcatgaaactacagccagtgctgcgacgtcactgatcacttacctaggactctacccacatgtcctccagaaagttcgagaagagataaagagcaaggtaggatgattctagaggttccccatttgcctaggacattcctctattaaccaccaccaccacccccactgtatataagtttgctcgatacacccagtactatgacagtgaagatctgagagctaggtgggactgtgggggagagactccacctcgtgaatttaaaaaggcagttgtttgtactgggctctctcttgggcagaatttgaccctctcctcctcctcctcctcctcctcctcttcctcctccaccaccaccaccatcaccaccttttatagagcaaggttctcctttccctgaccaagaacatgaataatgtgattagagccaatagctgatcagggtcgcagtgttggtgagggctcagggtatgaccctttatatacctgataagcaacattgtctggataatgggtttaggctgaggaagtgtggaaaggaaggccatcaggccatcagctctttcccttttatcctctcccatccagacgccttcaggtttagttaacaggtgagtcctgctgggctgactttttttttggagtgcccagggatccatcactcacttttttatctgtttccatagggcttactttgcaagagcaatcaagacaacaagttagacatggaaactttggaacagcttaaatacactgggtgtgtcattaaggagaccctgcgattgaatcctccggttccaggagggtttcgggttgctctgaagacttttgagctgaatgtgagtgcacctcctgtcccccacccccagccctcgtccacgtccactctgctatgctgttgagcatcagctgcccagagcagtggctcactgcccttgacagtgtcctgcctcctatggtactgggaaccaatttgctctcctctcttaatgccatccatgctagtaatgactttttgttgttgcaagctcagggccgggattgtcaattcttaggatttttttttttttttaaacagggataccagatccccaagggctggaatgttatttacagtatctgtgacacccacgatgtggcagatatcttcactaacaaggaggaatttaatcccgaccgctttatagtgcctcatccagaggatgcttcccggttcagcttcattccatttggaggaggccttcggagctgtgtaggcaaagagtttgcaaaaattcttcttaagatatttacagtggagctggctaggcactgtgattggcagcttctaaatggacctcctacaatgaagacaagccccactgtgtaccctgtggacaatctccctgcaagatttacccacttccagggagatatctgatagctatttcaattcttggacttatttgaagtgtatattgttttttttaaaatagtgtcatgttgactttatttaatttctaaatgtatagtatgatatttatgtgtctctactacagtcccgtggtcttaaatattaaaataatgaatttgtatgatttcccaataaagt

SEQ ID NO: 40 - DNA, 1721 bp, Mus musculus
gcggggttcggagctagggcggcggcggcaggtggcgcgggaggctgaagcgtgccatggggctcccggcgctgctggccagtgcgctctgcaccttcgtgctgccgctgctgctcttcctggcggcgctcaagctctgggacctgtactgtgtgagcagccgcgatcgcagctgcgccctccccttgccccccggtaccatgggcttcccattctttggggaaacattgcagatggtgcttcagcggaggaagtttctgcagatgaagcgcaggaaatacggcttcatctacaagacgcatctgtttgggcggcccacggtgcgggtgatgggcgcggataatgtgcggcgcatcttgctgggagagcaccggttggtgtcggtgcactggcccgcgtcggtgcgcaccatcctgggcgctggctgcctctccaacctgcacgattcctcgcacaagcagcgaaagaaggtgattatgcaggccttcagccgcgaggcactccagtgctacgtgcccgtgatcgctgaggaagtcagcagttgtctggagcagtggctaagctgcggcgagcgcggcctcctggtctaccccgaggtgaagcgcctcatgttccgcatcgccatgcgcatcctgctgggctgcgagccgggtccagcgggcggcggggaggacgagcagcagctcgtggaggctttcgaggagatgacccgcaatctcttctctcttcccattgacgtgccctttagcggcctgtaccggggcgtgaaggcgcggaaccttatacacgcgcgcatcgaggagaacattcgcgccaagatccgccggcttcaggctacagagccggatgggggttgcaaggacgcgctgcagctcctgattgagcactcgtgggagaggggagagaggctggatatgcaggcactaaaacaatcgtcaacagagctcctctttggtggtcatgaaactacagccagtgctgcgacgtcactgatcacttacctaggactctacccacatgtcctccagaaagttcgagaagagataaagagcaagggcttactttgcaagagcaatcaagacaacaagttagacatggaaactttggaacagcttaaatacactgggtgtgtcattaaggagaccctgcgattgaatcctccggttccaggagggtttcgggttgctctgaagacttttgagctgaatggataccagatccccaagggctggaatgttatttacagtatctgtgacacccacgatgtggcagatatcttcactaacaaggaggaatttaatcccgaccgctttatagtgcctcatccagaggatgcttcccggttcagcttcattccatttggaggaggccttcggagctgtgtaggcaaagagtttgcaaaaattcttcttaagatatttacagtggagctggctaggcactgtgattggcagcttctaaatggacctcctacaatgaagacaagccccactgtgtaccctgtggacaatctccctgcaagatttacccacttccagggagatatctgatagctatttcaattcttggacttatttgaagtgtatattgttttttttaaaatagtgtcatgttgactttatttaatttctaaatgtatagtatgatatttatgtgtctctactacagtcccgtggtcttaaatattaaaataatgaatttgtatgatttcccaataaagt

SEQ ID NO: 41 - protein, 489 aa, Mus musculus
MGLPALLASALCTFVLPLLLFLAALKLWDLYCVSSRDRSCALPLPPGTMGFPFFGETLQMVLQRRKFLQMKRRKYGFIYKTHLFGRPTVRVMGADNVRRILLGEHRLVSVHWPASVRTILGAGCLSNLHDSSHKQRKKVIMQAFSREALQCYVPVIAEEVSSCLEQWLSCGERGLLVYPEVKRLMFRIAMRILLGCEPGPAGGGEDEQQLVEAFEEMTRNLFSLPIDVPFSGRGVKARNLIHARIEENIRAKIRRLQATEPDGGCKDALQLLIEHSWERGERLDMQALKQSSTELLFGGHETTASAATSLITYLGPHVLQKVREEIKSKGLLCKSNQDNKLDMLEQLKYTGCVIKETLRLNPPVPGGFRVKTFELNGYQIPKGWNVIYSICDTHDVADIFTNKEEFNPDRFIVPHPEDASRFSFIPFGGGLRSCVGKEFAKILLKIFTVELARHCDWQLLNGPPTMKTSPTVYPVDNLPARFTHFQGDI

SEQ ID NO: 42 - DNA, 4411 bp, Homo sapiens
ccggcacctggaaatggaaagccagtgaaggctgctttgggccggggcagcgggtgggaccgggcgggagggattccaaagagaccgccgggaaggctagagcttggaattccggctcctcggagtcctggccctcccccaccgccgcctcggagctcagcacaccttggatgggggaggcgggcagctcctagccccgcaccccaggaggcgcgctcggagggaagccgccaccgcgccgcctctgcctcggcgcggaacaaacggttaaagattttgggcagcgcctcgcggggggaggagccaggggcccaatccgcaattaaagatgaactttgggtgaactaattgtctgaccaaggtaacgtgggcagcaacctgggccgcctataaagcggcagcgccgtggggtttgaagcgctggcggcggcggcaggtggcgcgggaggtcgcggcgcgccatggggctcccggcgctgctggccagtgcgctctgcaccttcgtgctgccgctgctgctcttcctggctgcgatcaagctctgggacctgtactgcgtgagcggccgcgaccgcagttgtgccctcccattgccccccgggactatgggcttccccttctttggggaaaccttgcagatggtactgcaggtaagggagggtggggcgggacaggctgcttccccggagcccggcgcggctctgggcttctgctgaagtcggggtaggcgcccccgggaggcatgctattgcggctaggagcagggctggcgggagcgcggcgctccccggcgccccctcatgcccacttctctcctccgccttcctcccacagcggaggaagttcctgcagatgaagcgcaggaaatacggcttcatctacaagacgcatctgttcgggcggcccaccgtacgggtgatgggcgcggacaatgtgcggcgcatcttgctcggagagcaccggctggtgtcggtccactggccagcgtcggtgcgcaccattctgggatctggctgcctctctaacctgcacgactcctcgcacaagcagcgcaagaaggtgggggcaggaggcgacggctggacagggagggggaccccatttatgagcggaattccggctgatggatgctaggcgcgggctagcagcttgaggtgggctaggaccctctgccagctccaggttagctttcccagctcggagagtgccatgtgtctggcaggactgggggtgtctggaaggggacggcggtagacgagaggggcggatggaggcttttaacgctgtcccctcctcgggactcaggtgattatgcgggccttcagccgcgaggcactcgaatgctacgtgccggtgatcaccgaggaagtgggcagcagcctggagcagtggctgagctgcggcgagcgcggcctcctggtctaccccgaggtgaagcgcctcatgttccgaatcgccatgcgcatcctactgggctgcgaaccccaactggcgggcgacggggactccgagcagcagcttgtggaggccttcgaggaaatgacccgcaatctcttctcgctgcccatcgacgtgcccttcagcgggctgtaccgggtaagggcggcaaacgggctgcggactaggggcgcgggacctgggcgtctgctcaccgccgcgcgctctctgcgctcagggcatgaaggcgcggaacctcattcacgcgcgcatcgagcagaacattcgcgccaagatctgcgggctgcgggcatccgaggcgggccagggctgcaaagacgcgctgcagctgttgatcgagcactcgtgggagaggggagagcggctggacatgcaggtgagtagcagcttcagaccaggcactgcggagtttggtcccctggctttccaagcgctgttcctggggcccccaaagcgcgcgcctggggcccagctttctggagtgggcggccggctcagactacagctatggaatcccgaaggaaggctgagacacccggtcaggagagctgcggaaggggctgcggcggaactgggagcatcccctagcctttccaggtttcaaagggaaagttggaatttgcaaaaatgttaataaagaaccttgcgattttaataaaactaagactttaactcaggagtttccggtagagcggggtcgtactcgccttactgctccagctgaactaaagggacgttgcattttgtttaaagatattgctttccttgactttctgtcagcaaaacatttagcccttctagtcttccctccagaactctcagttcgattctgagtaatccttctgtcaaaccgcaggcagacttgtgagaatgtgggtctcactctattcttaggcactaaagcaatcttcaaccgaactcctctttggaggacacgaaaccacggccagtgcagccacatctctgatcacttacctggggctctacccacatgttctccagaaagtgcgagaagagctgaagagtaaggtagggagactgggtctgggggtgtccttattagcttaggaaattcagctgctccctagccaacttccgaataagtcagtgtgctgccttcatggagtattttgaaagtgcagggcccagggctgcgtgggccagtgggcagaattagctttgtgaataaacaggatggagtcttgagctgtgagcccacttgggcagggtttgaccttgtattcctacccctcctccaccttttgctgaaccgtggagattctcagataggttccactttcttgaattggtgtgtccaagggcatacatagtgtgaatagctgattagtgtgggtggtggtggtgagtgtggggtgggggggcgtggggagaaacttggtccttctaactggtgagcagcattctcctgggattgtaaatagatagtggatttgggcaggcaaatggccattagctgctgtttccccctcccagtctctcccatcatggggccctttgggtttagtctccacttaagccctgtttacgtctgctgggctgattttattggagcacaaaataactgttcacctctgtatgactgttttgatagggtttactttgcaagagcaatcaagacaacaagttggacatggaaattttggaacaacttaaatacatcgggtgtgttattaaggagacccttcgactgaatcccccagttccaggagggtttcgggttgctctgaagacttttgaattaaatgtaagttaaaattctcttctttctcccttttgttgtggtttaaaaactcctctttcttccctatgctgtggctgcaattcttatgcttttgataattgttctgccctatatggagatatgtttcagcaacctggatccacctctctctttctacctctcccttgcttttagctcataatttcccccaaagatatcagtgactgctttttgttgttgaaagttaaattccagtttgtcagcccttggggtttcataatcttttgcagggataccagattcccaagggctggaatgttatctacagtatctgtgatactcatgatgtggcagagatcttcaccaacaaggaagaatttaatcctgaccgattcatgctgcctcacccagaggatgcatccaggttcagcttcattccatttggaggaggccttaggagctgtgtaggcaaagaatttgcaaaaattcttctcaaaatatttacagtggagctggccaggcattgtgactggcagcttctaaatggacctcctacaatgaaaaccagtcccaccgtgtatcctgtggacaatctccctgcaagattcacccatttccatggggaaatctgatgagcttgaatgttcaaacctgagacttattggaagtgtacatatgagtttttaaggagtgttgtgttgactttatatttaatttctaaatgtatattataatatttatgtgttttgactatactaccacaatctttaaatattaaaataatgaatttgtatcatttccaaataaagtaaaatttgaaggtacttttctggtattttaagattcctgttgggtaaaactcaccagtttagtattttcttagtgtatttaaccagattttacaatgcctacctggacttatttgtcatctttgcatctgttttctgtgagaagaaatcttagctgttttttatgttaacagttattagaaaatatatgtctgtgtgtgttattccagacgtatctctgtaaattcttctatagtcacttagattccctatttggaaaattgatccaagttaatttaatttttttttggtttgctgtactttagggaaagatgaacctgaaaaggtaacactgagaactgtcactctaacctctccagcttatctaacatgtcataaacataataaatctgtgttgtccaat

SEQ ID NO: 43 - DNA, 2246 bp, Homo sapiens
ccggcacctggaaatggaaagccagtgaaggctgctttgggccggggcagcgggtgggaccgggcgggagggattccaaagagaccgccgggaaggctagagcttggaattccggctcctcggagtcctggccctcccccaccgccgcctcggagctcagcacaccttggatgggggaggcgggcagctcctagccccgcaccccaggaggcgcgctcggagggaagccgccaccgcgccgcctctgcctcggcgcggaacaaacggttaaagattttgggcagcgcctcgcggggggaggagccaggggcccaatccgcaattaaagatgaactttgggtgaactaattgtctgaccaagcggaggaagttcctgcagatgaagcgcaggaaatacggcttcatctacaagacgcatctgttcgggcggcccaccgtacgggtgatgggcgcggacaatgtgcggcgcatcttgctcggagagcaccggctggtgtcggtccactggccagcgtcggtgcgcaccattctgggatctggctgcctctctaacctgcacgactcctcgcacaagcagcgcaagaaggtgattatgcgggccttcagccgcgaggcactcgaatgctacgtgccggtgatcaccgaggaagtgggcagcagcctggagcagtggctgagctgcggcgagcgcggcctcctggtctaccccgaggtgaagcgcctcatgttccgaatcgccatgcgcatcctactgggctgcgaaccccaactggcgggcgacggggactccgagcagcagcttgtggaggccttcgaggaaatgacccgcaatctcttctcgctgcccatcgacgtgcccttcagcgggctgtaccggggcatgaaggcgcggaacctcattcacgcgcgcatcgagcagaacattcgcgccaagatctgcgggctgcgggcatccgaggcgggccagggctgcaaagacgcgctgcagctgttgatcgagcactcgtgggagaggggagagcggctggacatgcaggcactaaagcaatcttcaaccgaactcctctttggaggacacgaaaccacggccagtgcagccacatctctgatcacttacctggggctctacccacatgttctccagaaagtgcgagaagagctgaagagtaagggtttactttgcaagagcaatcaagacaacaagttggacatggaaattttggaacaacttaaatacatcgggtgtgttattaaggagacccttcgactgaatcccccagttccaggagggtttcgggttgctctgaagacttttgaattaaatggataccagattcccaagggctggaatgttatctacagtatctgtgatactcatgatgtggcagagatcttcaccaacaaggaagaatttaatcctgaccgattcatgctgcctcacccagaggatgcatccaggttcagcttcattccatttggaggaggccttaggagctgtgtaggcaaagaatttgcaaaaattcttctcaaaatatttacagtggagctggccaggcattgtgactggcagcttctaaatggacctcctacaatgaaaaccagtcccaccgtgtatcctgtggacaatctccctgcaagattcacccatttccatggggaaatctgatgagcttgaatgttcaaacctgagacttattggaagtgtacatatgagtttttaaggagtgttgtgttgactttatatttaatttctaaatgtatattataatatttatgtgttttgactatactaccacaatctttaaatattaaaataatgaatttgtatcatttccaaataaagtaaaatttgaaggtacttttctggtattttaagattcctgttgggtaaaactcaccagtttagtattttcttagtgtatttaaccagattttacaatgcctacctggacttatttgtcatctttgcatctgttttctgtgagaagaaatcttagctgttttttatgttaacagttattagaaaatatatgtctgtgtgtgttattccagacgtatctctgtaaattcttctatagtcacttagattccctatttggaaaattgatccaagttaatttaatttttttttggtttgctgtactttagggaaagatgaacctgaaaaggtaacactgagaactgtcactctaacctctccagcttatctaacatgtcataaacataataaatctgtgttgtccaat

SEQ ID NO: 44 - protein, 420 aa, Homo sapiens
MKRRKYGFIYKTHLFGRPTVRVMGADNVRRILLGEHRLVSVHWPASVRTILGSGCLSNLHDSSHKQRKKVIMRAFSREALECYVPVITEEVGSSLEQWLSCGERGLLVYPEVKRLMFRIAMRILLGCEPQLAGDGDSEQQLVEAFEEMTRNLFSLPIDVPFSGRGMKARNLIHARIEQNIRAKICGLRASEAGQGCKDALQLLIEHSWERGERLDMQALKQSSTELLFGGHETTASAATSLITYLGPHVLQKVREELKSKGLLCKSNQDNKLDMEIQLKYIGCVIKETLRLNPPVPGGFRVKTFELNGYQIPKGWNVIYSICDTHDVAEIFTNKEEFNPDRFMLPHPEDASRFSFIPFGGGLRSCVGKEFAKILLKIFTVELARHCDWQLLNGPPTMKTSPTVYPVDNLPARFTHFHGEI

SEQ ID NO: 45 - DNA, 2099 bp, Homo sapiens
gtggcgcgggaggtcgcggcgcgccatggggctcccggcgctgctggccagtgcgctctgcaccttcgtgctgccgctgctgctcttcctggctgcgatcaagctctgggacctgtactgcgtgagcggccgcgaccgcagttgtgccctcccattgccccccgggactatgggcttccccttctttggggaaaccttgcagatggtactgcagcggaggaagttcctgcagatgaagcgcaggaaatacggcttcatctacaagacgcatctgttcgggcggcccaccgtacgggtgatgggcgcggacaatgtgcggcgcatcttgctcggagagcaccggctggtgtcggtccactggccagcgtcggtgcgcaccattctgggatctggctgcctctctaacctgcacgactcctcgcacaagcagcgcaagaaggtgattatgcgggccttcagccgcgaggcactcgaatgctacgtgccggtgatcaccgaggaagtgggcagcagcctggagcagtggctgagctgcggcgagcgcggcctcctggtctaccccgaggtgaagcgcctcatgttccgaatcgccatgcgcatcctactgggctgcgaaccccaactggcgggcgacggggactccgagcagcagcttgtggaggccttcgaggaaatgacccgcaatctcttctcgctgcccatcgacgtgcccttcagcgggctgtaccggggcatgaaggcgcggaacctcattcacgcgcgcatcgagcagaacattcgcgccaagatctgcgggctgcgggcatccgaggcgggccagggctgcaaagacgcgctgcagctgttgatcgagcactcgtgggagaggggagagcggctggacatgcaggcactaaagcaatcttcaaccgaactcctctttggaggacacgaaaccacggccagtgcagccacatctctgatcacttacctggggctctacccacatgttctccagaaagtgcgagaagagctgaagagtaagggtttactttgcaagagcaatcaagacaacaagttggacatggaaattttggaacaacttaaatacatcgggtgtgttattaaggagacccttcgactgaatcccccagttccaggagggtttcgggttgctctgaagacttttgaattaaatggataccagattcccaagggctggaatgttatctacagtatctgtgatactcatgatgtggcagagatcttcaccaacaaggaagaatttaatcctgaccgattcatgctgcctcacccagaggatgcatccaggttcagcttcattccatttggaggaggccttaggagctgtgtaggcaaagaatttgcaaaaattcttctcaaaatatttacagtggagctggccaggcattgtgactggcagcttctaaatggacctcctacaatgaaaaccagtcccaccgtgtatcctgtggacaatctccctgcaagattcacccatttccatggggaaatctgatgagcttgaatgttcaaacctgagacttattggaagtgtacatatgagtttttaaggagtgttgtgttgactttatatttaatttctaaatgtatattataatatttatgtgttttgactatactaccacaatctttaaatattaaaataatgaatttgtatcatttccaaataaagtaaaatttgaaggtacttttctggtattttaagattcctgttgggtaaaactcaccagtttagtattttcttagtgtatttaaccagattttacaatgcctacctggacttatttgtcatctttgcatctgttttctgtgagaagaaatcttagctgttttttatgttaacagttattagaaaatatatgtctgtgtgtgttattccagacgtatctctgtaaattcttctatagtcacttagattccctatttggaaaattgatccaagttaatttaatttttttttggtttgctgtactttagggaaagatgaacctgaaaaggtaacactgagaactgtcactctaacctctccagcttatctaacatgtcataaacataataaatctgtgttgtccaat

SEQ ID NO: 46 - protein, 489 aa, Homo sapiens
MGLPALLASALCTFVLPLLLFLAAIKLWDLYCVSGRDRSCALPLPPGTMGFPFFGETLQMVLQRRKFLQMKRRKYGFIYKTHLFGRPTVRVMGADNVRRILLGEHRLVSVHWPASVRTILGSGCLSNLHDSSHKQRKKVIMRAFSREALECYVPVITEEVGSSLEQWLSCGERGLLVYPEVKRLMFRIAMRILLGCEPQLAGDGDSEQQLVEAFEEMTRNLFSLPIDVPFSGRGMKARNLIHARIEQNIRAKICGLRASEAGQGCKDALQLLIEHSWERGERLDMQALKQSSTELLFGGHETTASAATSLITYLGPHVLQKVREELKSKGLLCKSNQDNKLDMEIQLKYIGCVIKETLRLNPPVPGGFRVKTFELNGYQIPKGWNVIYSICDTHDVAEIFTNKEEFNPDRFMLPHPEDASRFSFIPFGGGLRSCVGKEFAKILLKIFTVELARHCDWQLLNGPPTMKTSPTVYPVDNLPARFTHFHGEI

SEQ ID NO: 47 - DNA, 64516 bp, Mus musculus
  misc_feature (1)...(64516): n = A,T,C or G
cccgcaggtgacacagagagagccccaggaaacccgtgaatgttgaagaaaattcatctttgaaattttaatattcgaggaaatctgcattcatactcatcttttattaatctgaggggatttttgttttatttaaaacttcttgatatttacaatgaatggacacagtgatgaagaaagtgttagaaatggcagcggagaatcaaggtaagcaagttctttaaaccagctggttacctgagacctgaaactgagtgtttttatcaaattgtcttagcttggcaaaagttaaaatgactctaatagcagttttgttaacattgcatattatgtgtgtgtgtgtgtgtgtgtgtgtgtgtaaagatagcaagatagcagggactatagaaggctttgatctatttaaatctattggagggtttatattttgaagtaattgaagctgaaacagtaaagagacattaaaattgatttggccattaatgaactgtccaaataaatgcagtaagaatttctgcactcctctttttttggagttttatgtcctacacctatgttgttcagttagctactagccacatgcaacagtttagattacaaaacattcaaaattctttaagttacacctgacatttcaaatagtatgtaaatgacatatgacacatgtccactatgttggacagcactattgggaactatttctaccactgtagaaaactttagataaaattgacgtgaattcagtttatgtttttttgtttgtttgtttgtttttgtttttttcgattgttatttttatattggtgttttagagttcttacttgaaccatattgtttcttagaaataaagtttatggaaataaaatgttgggccattttatgtgtaagacagccttaggatctgtggtaaagcactcaccgctctccacaaaaattctcaccccaaattaaatggagcattgaaattataggcatttatcaattactgcctgctccaacgccattcaattcttttatatttttaatagtctccacattactgttacagttcattatttatgtatacttaacatagaaatcagcaaagtaggtgttggagtctgactgcgcagtcaatcctgactttcagttacacactgtgaattgaggtaaattactctgttgttctgatatttggtcttgcaaaatggaaattacactattatttacaaaacataagacatgtgagatgctgccatgtcaggcttgaaatggtttcatggacaatagacattgatgtcccatgtaggtgctgggatagcttacaaaagcagagtagtgacaacacagagaattgaacattgtagttacataagtatggatctagaagttaaaaacctgggttgagcctgggagtggtggtgtacacttttaatccctgcattcgggaggtagaggcaggtgagtctctaagctggaggccatcctggtctacataagagtttcaggatagtcagtactacatagagagaccctgcctcaaaaaactaaggggttggaaggggggggcgttgtacaggtatatgtggtaaaatttatagagtcaatggagttgaagttagaggatttgtgtatgtgtgtgtgtatgagagagaggtggggggagagaaggggggggagagagagatatattgattgattgattaagagagagaataagagatttttttttattttgggacagagtttcatgatgtagcccttgctcacttaattctcattatgtagaccaggctagctatgaatttactgagatccacttggctttggcctctgagtgctggtccacttaagaggatgtttacacttcaattttgattcctatctctgtagatacattgtagtaagtgaatagaagagttacatgtttaaggtctcattcattaggagaaacataggaatcagggtaccacagactcttgaccaaatatctacttgcttaaatcaggggattacctgcttgtacagtctcaaaacttaacctatttcagtgttgctgccatatctaaacttttttctgtagcaaggcacattgtatatttcttagccaacacaatcaaatttgtttaactatttccgatgttacttttatttttccaacttggcatagctggaatattattcctctaattcatatattattcctgtaatcctaggaagggaggtggggggtgagaggattatatttttttctcaatttatactcattttaagtgctaccaaagcatatttctgtaagatttggagttagtaattctgccatcagacactggcgcttgtgagtctgaccgttgaggggtctgactccgtgtgctgtggagttgattagtttctgcttgtttgcccttccccttcttgctgttttgttgtcttatttcctcttcaccctttgtttgtcactgatagttcctatcctatcctttctcctaaatgctttcattgtaaggttgtgcaaagaaaggagttgtgtctagttaactgaggagttaaaccctacagataggatttcttatcaaaatactgaaaggtatcacaactaaaaatattaatgatggagaaatgagaaaaacagtccacttttgaggttagtatacatcgtaaatagttaaacaaatttgattgtgttggctaagaaatatacaatgtgttttgctacagaatttcatttttattttgtggacgcttctgaaatgttaccatttgttattttgggttgggcttagctttttacagaaaaagactatggaggcgaggggctgtttccttctgtatagaacagtctctagtgatgaaaagaattgttgagtagatcctttggctctggcttaactgatagttttgaaaccttgcttggaaaagtgggttagggctgagatggggaagtggacgcaggcttcttctgctcctaaccaagaagctatttgcggtttggtggcaaaggaacaattagttgtccgtggagtcttacttggtagtaactgtatttctgggtgggccaacccaaaactaactcagtggtagttttatagatttttttttccactttgctttgttggggcatttttttcttattggtctttggtttgtatatcatggtttctgatttgtgttttagtggggcggcctgctttccttcctttcctccctccctccctccctccctccctcccttctcaccttcctttccaccctgagagagggcatggagttgggtaagcgggaaagctctgggaggagttagtagagggaaacgtatcagataggttgtatgaagatgatatttctatggcccatgtcttatgatcctagcactcaagaggcagaggcagagctctggattcaaggccagccttgcctacctatagagggtgtcccaggatagcgggttggacaaaaacccagtaaataaaataaattaaaaaataaagcaaaattatgtgtttgtgtttctagagtaagtctttagtttttaatactatgcatgcacttttatactacgcatacagtttttaatacgcatacatacctgtatgcggttcggttgaacagagggttctgtcactgacaggctctctcaccactgtgcttcgaggccccagccatcaggccacctgtgtggacttggtgtgtgcagattcttcagactctgcttaaacattttaaaagattgtgctcactcattcttttcctattcctgcacatgaagggttcacgtggtcagtagttctacccctgagctaccccgcagattttcatcctaatggtatttcgaagaatggtttaacctagtaatggattcaagggcaaatatttgaaacttgcaatcatattttgcttgttttttggataattgatagatgcttgttaggttcaatttttagcaattttgtcatgtaaggcttacaaatgtggcgccttagtcaatcggttgttctcagccttccaaatgctgagttcagtcactttatacagctccttatgcttttgctgatccccagccataaaattatttttgtttctacttcataactgtaattctggtagctctgaatcactgagtaaatagctggtctgcagaatacctgatgggtccctgtgaaggggccattagaccccgaggtggagagccaccacataactatatgttatgcccttgaatagttcttacatagtgggagatattggtaatatgctttaatagtctcacatagtctgtacttaattgaattcagttgacctaattcttagaataaagtcttttgtatgtgtatatgcagggacataggccatagaacctagaacctttagtatactaggcaagttttctacacagaattagacctaaagtctttatttttaagcaatgttaataatgataaatgtgtgggttaggttgagtttccatccttagccacttatttcaaggattatataagtgtgcatatgccttatatatatacataaaaaattatttgggtgtgtgtgtgtgtgtggctcaggtggtaggaggcagaggcaggtagatctctgagttcaagaccagcctctctacagagcaagttccaggatagtcagggctatacggagaaaccctgtttcaaaaacaacacaaaacaaaacacttggtttatcttttgcattagatttgaatactttttataagacattgtaaaaaaatgatgcttcttgctcttcgttttacaatcactttttaaaaagttagttgagaaagtttgtgaagtaatgctagctgtgaaataatgacaggaaggcagaaaactaggaaatgatgaagatgggatggccagaggtgacacagttcagaaatcaggctgtgacagtttccggtgatgtcattcgttaggtgcaagagagagtaaatcttgggtttatttaatttctcttagtgcacattttgttcagttgtactttctttgtctttattttttttttcctcacatcctctggatgcttctgaagctaagatttctattgggaaaactcagtgtgctgcacaccagcctctttggctgtcggctagtctctgagtagaattaccaagttataattttcataggctttcctgagattgtagtaagtataggttactataattagtgttacttttagctggtgagtttgggaggattatgcgatttttcttgtgcagtgctgtctttccctataaaggtaagatactgtacaggcagtggtaatagcaagttgcctgtttatgtacctaactggatcatacctgttgtagttctatattttaaaaaatgtgtttcttctgtaaagagttgtttgaaaggttagttttctttaaattttcttatttttttaatttatttgatgtatgtgacaaggtctcactgtagcccaggctggtttgaacttgctatgtatatagtaagactggcttggagctattgggagctctgtctctcaagggagagttgagatttgaaaggagagctgggattaaaagtgtgtaactgtgcttggaagtagtttctctctctctctctctctctctctctctctctctctctctctttctttttttgtttttccagacagggtttctctgtgtagccctggctgtcttggaactcactttgtagaccaggctggcctcgaactcagaaatccgcctgcctccgcctcccgagtactgggattaatgggaaagttttagaatgcacagccagagaagtgttagagcccagttgtggggcattcttccaagcctgttgggaatggagaactgggcttcacactggagtcttcttcgtattgtaccagattcctaagtgatttgtgtttgtgtttaaatcagagtataaatgtatacgtgaaatgaacccatctacctaagtaattgagccacttattcctacagttgttgttactggtgttttacttaaacaaggttttattttctgtgaattcctgaggaatattgtcatgagccatgctagagagaggctaggtaaattttattttgctagaaacacacacattggcaaaacacacacattgttgattttctgattgaaccaagcaaggtgcacgcagggcactttgtgtcacaggaaatttcaaaacacattcccacaaaaccccattgctatccacagtgttacggttttgctttctgcgtaggaaaataaggtttacagttttaaaatgttatttttatgtgtgtgtttgtatgccacattcgtatgcctgactgaggaggtataattggggtgttggatcctgcagagttacaggcaacataacgtggtgctaggaactgaatttgggtcctctgcaagagcagcaagtccttttagccacttgatcatctcgtttagctcctgtaacaattttaaaactcactgttttaaagccatgactatgaagcctgggagctgactacatggtaaatgctggcttggtaacagcattcggattagagtttggatcccagaccttacatggggcatccagctgcaatctcagcattgggagctggagatagatctaggaccccagagacctgcctagtgcgtgcgtgccttccaggttcagtgagaggtcctgactcaacaagtggtggggggctgggaagatggcagggactggtcagcaaactttggttttaattgagaccctctcagcagataaagcagatggaactaggaaatatatgtgtgcaaaaactgtccataaacttgccctgtagaccacgctggcctggaacttagagatcattgtaactgcttcctgagtgctgggattaaaggcgcaggccaccgctcccagctcctcagcgttcatagccccactcttgtgctcttatgacgtatacattctacagtgggaaagctggctcaggttatccgtgcacctatatatatatattacacctagaagatatgaaaaaataggttcagaacgtttaggctttaatcccagtagaaaccaatttgccaactttgaactcagtgtatacatacatacgcacatttagccttgcagtatccactcaacccagcattttccaaagctgcactttggaaatatatacatacacacacacacacacacacacacacacacacacacacacacacacacacacacacacatacacatacatacacacttttagttaggcagattagggctgtatagctgtgcaggggaggtgatgaaaggcagtttggtaagtgctagaaccatgcagtgagcaatatggaagattcccgcagaacttttacaatctgggtaaaaatttacgtagttttcaaagaaagaaaaaagatacttttactaggaaatggaagtttttaaaaatagtatatcccagtaaagaaaagctgttctctctaatcaagagaaatattagacattctagttttacactctttaacctgagcttggttcctcctcatgctgaagattttgtgtgggttagttggagtgggggaatgaaggaaacttgagacaaggaggcagagtagacaatgggaaggtaaacagaagaggtgtgcacaggggctcctcagagccccagaaaaggacagacagacagtatacacacgggctcctcagacccactagttttgagggagacaatactgtactggaacttcctgtaacttagtgactcttcttcataagtgaagctgtgttgttagctgccactgggcgtgaggttgaccgcttactcaaaagctaacagttagcgacatgctaagccacagacaaaggtttctttggtgtgggcagattaggtaagatgtaagttgctgttgaaatgaataacagagaaaggttaaaagacattcctggtagtcggtgtctgctttctctctcaaagctgaagcccaggaggaaactttctgggccctcttagtgaccctagctgctgctgcctcacagccacattgcctctttcagaaacacagttttcactggaatggaatgcaggttttgtttgtttttttctttttaaaattttcagttttattttttaaaagagggatcatttagaacctcagtaaacttaaatttttgtatatattaaaatcccatgctgctgtacattttatgaggtacattttgacaggttttgtaaaaaggcagactagctgggggttggagtagtccttttctagcatgggcaagactgaggctcaggtataccagaaggtgggactgggactgatgacagtgctctcagaagtgaatgcagcagcagggagagcagtgaggaactgggcagagctgtctgtctccttagctcactaatgatgaccctggatttctattgctgaggtagatgatggttatcatcctctgaggaagcatccagggtagttttgtttgcctgcatctgtctaagtggactgtgtgtatgcctggtccctgtggcggcctgaagagggtgctagatcccctggaactgacttagaggtggctgtgagctgccacatgggtcctgcaaaagcagctggtattctcagcctctgagccatctctagcccctagagtgcctttttttccctctcagatatgaataactgaatccagaaatacattaataagaggaagtgacttgaatgtgtattaaataccagctgtataagtgggtgctcatattgtaaataacttaatcctagccttagcatgtactatgccaaagggttgacttgcacagtcgattagttgtacattgtcctgattataattaacccagcgtgcactgtactggctatagtattgttcagtaatattgtatagtattgttcagaaagtgactcacaaaatagatgcaggctaggcttatattatttggctatatacatactgatgaaatactaaactataaatagttttgtttaaaactatacagtattgggatctgctttttttttttttttgctttggtttgtttgtttgtttgtttgagacaggatgtcatcatgtagccttggctggcctggaacttgctatgtagattgggctggtctcaaactcactagagatcctcctatttctgattcctgggtgctggctgggattaaaggcaaacatcaccactggtgggaactttatttcttgtggaagcattaaagaaatttaaacacattaatgtttttaaaacgtggcattattctgctgactcagctgccttgggtaatttcaggcatccctgaagcaatggcagccacagggtgagcggccatgtgcatggtgtgccctcagcactgtggcaatgcagtgccatctcttaattctgcctgctggactaccttacttgattacttttaaattgttcactgctacgtggtcagtaatactgatgaggggaaaagctacccacttataaatgatagaattagccattgatcctcttaatactgtgatttcaaatgtattttatgaaatgattgccagtaaaatctaattgtatgtgtgtgtcctcctcattttccatctcttgatactgaaaagtagtggctctcagtctgtggctcttggggtcaaagagccctttcacaggggttgcctaagaccattagaaagcatatttacattacaattcataacagtaaaatgagttatgaagtagcagtggaagtcattttatggttggggtcatagcaacaggaggaactgggtttaagggttgcagcattaggaaggccgaggacccctgctctagagcactttgagtttatcctcaaactcagcatgactaagccagttacctttcaactttgtcatgctaaatgttaccctttctagcatccatttctagcagcctattcccatttcttcattgggactttgggtaggtagggtcatagtgtggtttattttgtctttgattggttgttttgaatgatcaaaagatctgtttttgtttgatggttaggacctaatagcagtggcatgacctggattttagagtcacatggaaaatggtaagatgatttccagattgactgaaatccttggaagccgtgctgatctctctctctctctctctctctctctctctctctctctctctctctctcagtttctctgtctctgtctctctctctctctctctctctctctctgtctctgtgtgtggtgcagaatcactgtgtaaaggcatacagattataatagtaaagtttgaagctgttgctcacacattcatttcttattagtagtgctctagggtcacctgttaacctctctctgtcaacattacttctacatctatggtgaaatggatatattacccaaataactggacttaagggtcccaacttaatgaaccccagcatctgattaggctggggatacttagtctaaaaattattttaatgttgtaaaggcgttatgcctgacatgtggaagatactgtgagtgcctgagctggagcagtgagctacatttagggcagtggggatggctgcagaaaagactgatgtcctgtagtcttggttctactgatgctatgaggagcaagcaagtctagggattggcacctatgctgggctctcgccccctctttgttttgactgtcttggaacttgctatgtagaccaggactctctgaggtctgcctgcctccacctcccaaagagctcctatttttttctctttccattctgtttgccctggcttcctccctgttttgttcctagtagaaacctctgctcactgattgttaaggaggtaaacaaatgaaatcaaattattaattgtagaaaacctttaaaaaaatgtctgtggctgggcagtggtggcgcacgcctttaatcccagtgcttgggaggcagaggcaggcggatttctgagttcgaggctagcctggtctacaaagtgagttccaggacagccaggctacacagagaaaccctgtctccaaaaaaaaaaaaaaaaaaaaaaaagtctgtgcattgaataaacaatacagtgtgaataaacaatacagtgtattagagttcccccgcccccaacatggtctcaaatgcacatcttcttcactgtcaggtaggtgtgtgctgcccttgaatttatgggttctgttatcgtggatacctgtctttacactacccttgtcctggctagtgggacagctttattgtagaggtgaaacacagtgaaaatatgcttaaactgtaggatttcatgtcttaaatgttgtcttactggagaagacatgtgagaaatggccttaacggccaacaagacaacgcaagacattttccaggtattagatgtttagggagttgattcctaaagtagagtcagcttctcccacagggtcagtgttacatgacagtgtgactgtatgggaagtagactgtgtgtcaggccttttcaattattccagaaaggttacagttttaattgactgaggaagaatacaatgaagcaatgtagaggcaaggaaaactggagaaaagaaggagaaggtatgcagaggttggtacatttctgtagaacaggaaggacggggggggggggtagtggtagcagtacattcattcataaactatcctgagtttggcaggtagaaagctagaaagcaggaatgattttgctaagtgaacactgtactggtgtgttggctgtgttggtcatgggtggagtgtcaggtagaaaagcacaccttggagtacagggccagcaggatagtggcacttaacagctttgcaggacaagtgcttgcttcaaggctgtctcagaggtaggacaaatgtgaattcaagggctgaaggaagaagatatgtgtttacattgcaaagcagagagaatgattttacagtcggtggatagatggctaccagagttcacacgataaacataagcctttaacatcctcaaaacaagttgtggtaaaagctttgacaccgtctcttagaagtttgacgtggatcccaggcccacggtttgtaactggggtggggggatggctgtctggatgcaggttagagttggaaaagcatttctgtcaggcagttcgtagatacagaatcgtaacattttagatatgcaattcatgaggatttgaccagggagcatagctgcacagaattccttgaaaaagaagtaaattaaaatgacttttattaaaggaatgttaatatttttgtaagcattcaagccgacagcaataccttagagaatgttagtttctaaattattacagatgtgaatgttgaatatgtttctctttttgctttggctacaaactttaaaatttatttaagatttattttggcttttatttctgagatacctactttttacacagtgagatttcttgttcgttgacagaatgtttactattttactcttacacgggcttggttggcctccccttgcttccactgccacctcatctcatgtcacatgtgatgtgacatgcattctgttccccctttctccttccccacttccttaagacactttctcctctctatccatgcctacccacccacatttgcacactcgaaaatttaaaatgtgtggtatttgtcttttccagtctgttccttcacactataattcccatttgatccttgtcctgcagatgtcagttctgtgtgtgtgtaccacacttgcatagctcttatgagttgattaagatctcagccactgtcaccctgttcttgtggatctagggcagcatccacgtggagtagagtctaggagtgctacagctgacttatatagtatttttcttttttggacaaacctctgttttaattttcagaatgccttcacctttgaaggaaaaccttaaagtcccaaacatggacttctagctgagtaagctaccagtaagctggtcagtcagtctgtctgtctttatggagaatttgaaaataggttgcaagaattgtgcctctacacatttaactttgtctaccctttctaagaacaaagtattctctttgagccagcatgttcagggaatcccacttctcatttccttttggccggccagtcccctcagtctttcactactatccagactaagagcacatactcaattggctgctgtttctcttgtgtctcttttaacctggaatagttctgtcttttattaaattgtctttggggactacacaccagccattttgtatagtatatatttcagcttgtgtttttttgatgtgtacttagaattaagatcaaatgatccatcttaagagcatctggaagctcatgtcttctatcctgttagtgctattgccttaaagagatactgtagtgtgtatttattgtaaaaggaaggggtcatttagaccagagattcccagcctcagtgctgcagtccctagtgcagccccttaggttcgcagttatttataactttaatttgttactgttatgaattataatgaaaatgcctgttttctaatggtcttaggccactagccccggggaaagggttgtgagccacaggttgagaagcactgcttttgctatgagaaaaaagaagtgttacttgtttttgagactggtcactttttgattgatattatcttttatcacatgtgagtttcagatgccccccaaaggccagaatagggcattggatccctgggagctggagttagagatggtatgggatctgaactcaggtcctctagaaaatctgtgtgtgctcttaatctctgagccaccactccagcccatgtgaaagatgtttgaaagttatataaatattgccaaatatggtggtacatactttattcccagcatttgggaaacagagagagacaagtggatttcttttctcatggctagcctggattacatagcaagttccaggccagccagggctacatagtgaatcttaaggagtctaaagctgctgtgtttgtggcagcagtgcatgcctttaatcccaacactcaggaggaagaagcaggtggatctctgtgagttccaggacagccaggaactctttcataaacagatagatagacacccactaacacccccccccccaaaaaaaaagagagcctaaaactatgtaaatattttactcatgaaattcttttatacttagcacctactgatagttctggtctgtactagtattttctgtgtgactttaatatgacttttctaaaactaccactctttgtctgaccctctcactgtacctgagtctgtcatcatcaggcacttgagttcctatttcatttgctggccaatattctttcagtgctgtattttgatattaaaaattagatctttataccagttcttatatcattttatctctctgtgctcttcctcttcttgaaatttgttttttcttttttttccttcccacatcaggcttgttaggctttggttttactttctgtggcacagcacttgtcttccattgctcaggagagttgtcatttaagtgtgcagtaatatttaggaatcatgatcagtgtgcaaggcagttattaaaatttaaaattacattttaattttaactgatcaaatggtgcatctttaaactctaaactattgaacctaagttaataataatatggtggcgcacgcctttaatcccagcgctcaggaggcagaggcaggtggatttctgagttcgagaccagcctggtctacaaagtgagttccaggacagccagggctgtacagagagattctgtctcaaaaaaaaaaaaaagacgtcaaaacagaaagtaatctttaaaaataaatgattctgattatatcaacttcttgttacacagaaattagtaggctttaaggcagtagtttaattatggggatgagcaattttgaagccagagagcaaaggaattatttcagttaccatcagcagtaatgttattaatctgaacttgattaattggatgtgtatatgtccatgcatatatattagcccctaagataaaacaagcagattattagtgtcatttggaaccaagaaactcaaccaaaatgatgtaaacataaaactgaaggagctaaaaataaaaaccctgtaattgtgaattagaagtactagcataaattaatgtatttttctctaaaaatacatgcattgtagttcattctgctcaccatacaaaatggcacatgtatagtcacaggcttacctcacacttgtattttagcttgaggcaagatatgctatgctttatcagaaagcaggttggctgcaatcattttatttgtataatgttcaagttagagtaaacatttataccatgaaatagttatcacttatattgaatcattgaaaacatctttctccctagctttaaaacgaaaaggtgtactctgattaccgtggtctgaagtcaccctgctgtgtagttggacatcagaattaatttcttctagaacattctcttcctctcagtcctgacacagtctttatcctatgaaagaacaacccaataaactactgtgcacgtaaataccagagttccgctttctaataacaaacatgttcctttactggaacagagacggacggatggacggacggatggatagatggatgatggatggatgatggatggatgatggatggatggatggatggatggatgatggatgnnnnnnnnnnnnnnnnnnnnatggatggatggatggatgatggatggatggatgatggatggatggatggatgatggatggatggatggatgatggatggatggatggatgatggatggatggatggatgatggatggatggatggatggatggatggatgatggatggatggatggatggatgatggatggatgatggatggatgatggatggatgatggatggatgatggatggatggatggatgatggatggatggatggatgatggatggatgatggatggatgatggatggatggatggatgatggatggatgatggatggatggatggatgatggatggatggatggatgatggatagatggatggatggatgatggatggatggatggatggatggatggatgatggatggatggatgtgatggatggatggatggatggatgatggatggatggatggaaggaagctgcccttggtcccatcaaccattaacttttaaattttagacacagtgtgttaggtctcaaattgtaaccaagagtgccactgatgttctgacctttctgccgtctccacccacttagtgtttgtaggcacgctttacccagttttattttaactcagggcttgtgtatgtttggcaagcaaattttatgctaggtgctttagtgaaaataagaatgcctgcaaagtaacaatctaagactttccatctccttaatttttttttttatgggaaggataaatttaacagtgctttctactaaatggtcttgattgattcaccaaacctagtcatgtctagatcagctgttataaacatagcacaggaagctgcttatcagcttacagagctacctcaaggtaggaggtcttttgactgtaaagactttgttgtttcagtctccccaggcctgatctatgagtggttctcagtaaagtttattgaattaatgggttttcttacctgcgagttaatagagaaataaaattgtcagggaaaaaaaaatctccactagtgttgctccagtttgtacaagtaaagtagttcaggtgaaatgggacatctcccctgtttttaaagacacttcatgatagctgagagactcagctgtgtgtttgcgggaggaaataaaggtgggaactgttagggaatggagagaaaaagcagtgttggtagaaacaatgttgcaaccataaatctcactagaggaaaagttttactttattactatgaaacaaaattacaccacattttaaaaatatatatgtatttgtcaatttaaacatttattttgcagaattaaaattctttctggaaattttattactctattttataactctcttaggtatccccccccccccacccccaaggagtagctttttaaagtagtctatcagcaaattgtgccatctggtggcagtttggaaaattacaaaaggtagaaaataccttctgcttctgtctcttaagtgattgcagtcttgcatcactacattgacagaaataatcttgaaaacaagtatgttgttttcactgcaagaaatgggcttattttctacctactgtagtaagaattcccaacatgtttattaatttcccacagttcctaaatttgaactgttataggtagcctctagtagggcttttttgacttacacatttttgtcttccctgtttctagccgagtatctcatagttggtagaccttgcacatctttgagggagattacagtcctacaaataagtatgtccaatggcctgtgatggcacacacctttatttaattccagcaccccaggaggcagaggtaggcaaatctctgtgagttccaggcaagcctaatgtacagagagagaacagccaggactgcatagaaaaacctgtgtctcacaaaccaaaacaaaagaaaaccaaatgtgtatgcctgtcttagttagggttttacccttgtgaacagacaccatgaccaaaacaagtcttataagggcagcatttaattggggctggcttataggttcagaggtttattagtccagtatcatcaaggtgggagcatggcagcatccagacaggcatggaacaggaggaacggaatgttctacatcttcatctgaaggctgctcgtggaagactggcttccaggcagccagggagagggccttatagcccatacccacactgtcacacctactccaacagggccacatctcctcatggtgccactctctgggccgagcatatacgaaccatcacatatgtctgttactataatgtacattgccctttgtgtttggacacagataattgaaatattaaactgtatgtttagctttctgctgaagaggtaaattcctttcgaattttgctctgatgctctgattaaagttttttattttcaattgtagtcagtcaggtgatgattgtgggtcagcatcaggctctggatctggctcgagttctggcagcagcagtgacggaagcagcagccaatccgggagcagcgactctgattctggctctgactcaggaagtcaatcagagtctgaatcagacacatcccgagagaacaaggttcaagcaaaaccaccaaaagtcgacggagccgaggtaagttagtgcaattgaactggcttaagacagaagttaaatcttataactgactggacagtgtcatggcctgggcatatagcgcagcagtacagcacttgtctaacacgcatgacattctggatttgtcccgagcaccacaagcaccaagtggtagaaattaaattccttagctaagagtaaaggctgcttgaggtcttctggttaggcttgtctgtctatctgcccaaggggatgctttattgctcactgcgggagggctcgacaaccgttgcctgcagcttacttactgcaaggtagctgtagtactcagagtaccaggctctggagaactaagatgcttgggcctaaattagaaaccatgttgtagctttgttagcagagaactctgtcccctgatccccccctccccacccccctcaaaaaaaaaaaaaaaggtcaagttgcatgagcaaaactgcagagtgccatggtttctttatatttagactctggcttttcacgttcacctaacacgggagaacataggtaggcagagtatgtaggagccatgcagtacatttccactctgttttgaaagacgttggaagcaccaggagcatgatggctttacataaagattcaacatgccatgtgtttctcatagtcactgaagccttgcattgtattccactgtattgcaggagcactgtattcatacggtgaacgaggagaataatttacttggaggggtgtaaatgttgaaacatttcatctctccctgctttgtttttggtacagttttggaaatctagccccagtattctggctgtccagagatctgcaatgcttaggaagcagccacagcaggcccagcagcagcgcccagcttcatctaatagtggatccgaagaagtaagttcccagtgagctgctccataagcacactctgcttacctactagacaccatggccttgaatgggtagtagtgtctgtatttcggtatgtgtattaatcttgatgtacagacatcttttttagtaccagtgttcctacttttagaggttaatctaaaacagtgggatttgtttcctcatcatggcaaaacaggaatgtatgtgatacctgcctgctttcccagctctcgagaggctgaagcactggctctctgtgcttgagaccaacccgtggtaccgagtaaaatactgtttcaagacaagaactggagaagccaaaggtgcacttgcaagaaatattaaatatgatgaattggtatgggaatgaatatctgtaatcttaggacttgtgagtgagatggaggcagaaggattgtaccttggaggccttttttcagtgcctcacccctaatattatgtatatggtagacacatgatttaatgggtaaagacatattattagttctatataaaattagagtccagatttgttattttgaatatttgtgtattttattagtttgctttctgtggtaaacattgaccaggagcaaatgggaaagaaagggcctctatttcatcatcctttcctgtcctgaaaggaagtcagggcagggacctggcgccagggactgaatcaggctatggacggccactgctcttcaggctgacaggggctttttgtttgtttgtttgtttggtttttcaagacggggtttctctgtgtagccctggctgtcctggaactcactctgtagaccaggctggccttgaactcagaaatccgcccgcctctgccttccaagtgcagggattaaaggcgtgagccaccaccgcccggctcaggctcacactttacctgcctttcttataccttccaggacctgcccatggtgacaccacatgagtgggctgggcccttacaccccagtcatcactcaagatgatgcccacagacttgtctctaggccatctgatggagtggctttctcattgagggctgttctccccaactgaatctcactcgtgttaactgggcgcgcacgcactcattcacatgctttcctggcctgagttattcccacttggtgtgtgttattggaatttattaattttcagtgcatatataatatagtactatgtattctatagtgaggtagtctactctgtcagtacacatatttgtgtatatatttgtgtattctagtgtcaacacacatataaaagaaattttactttttaagagataactggcatgcataccactttttttggtaatattcttttttatgtgtcttagttaggttttggttgctgtgataaaaacaccaagaccaaagcaatttacagaaggaaggatttatttggggcttaacattcctgagggataaagagtccatcactattacagtggggaagtgggacagcaggctggcatggctcctggagctgagaactcaaaccatgaactggaagcagagaggtaaattgggaatagcccagttttcaaatgttaaagctggctccagtgatacttcctccgcccacccagagagtaccaccaactcagaactctattcaatgcccaggattagggggaacatctcattcaaaccactatagtgtgtgtgtgtgtgtgtgtgtctgtctgtctatgttatagttatagctagcaaaatgaatgctgactagcatagcaaaagaaactctaactcggttagacttgaattgtgagttagtgaccccagcctcgtttctcgctaggactcgtccagcagtgaagactccgacgactcgtccagcggtgccaagaggaagaagcacaatgagtatgtgatttcattcagctgactcgtgttgtgttgtgttgtgtttgttcacttgttttttgagacagggtttgtctgtgtagccctggctaacctacaactcactctgtagaccaggctggcctcagactcaggtctgcctgcctctgcctcctgagtgctgtgttaaaggtgtgcatcaccacgcccagctcattcaacttactttgaatgctaaggaaatactatggtttcgtatttcttttgtacatttcctttccaaaagtagttttaaaaattcttagttcatggtgtttttgaagttaatttaaaccactaccataacatttgtctttctataaccagctgatgtctttttttatgccagttcttttatatgttgtaacctatttcctatttatttgtagattaaagattgactttaagtgatatcaaagaactactttccaaatacattctactttccaagttttctaacttgggagaaaagcctgtaagacggcaggatagttgagtgacttggttattgtgttaattccccaaacagtccgtctacacaggaagtttgcctgtgcagagttcacgtagagtctcaaactcagtataactgccacagattttgacccagaaagcaggtagaacactttcttacattaggtccactccactagtttgccttttcattctgatgtttttgaccgatctttttctatttgtcttgggtattctgtttatttactttgttctatgtgtgtttgcatttactatttttctaatatgttttatatgtttataagattcatgtttttagtttctgaaagttctgtttttgtacctttggttatttgctgtttctcttttccctgtctctcaaagggcatacgtgttactttgtgtacttcagataatctagctttactctgtaaatcttactgtgtcatgtttggtcttgctctgcggcattgtgtctgatttctttggatctgtcttacagctttgtgtgtgtgatgctggctacacactttcagaaaagcactgatgattgagctaccctgtattctagttttcagtaaaaagtatattgtattttcaactatgatgtcttctcagctatttatatcttttattgagctgataaattctcaattagcatggtcataggaaaataataaaagacaaatactttgggctgatacatagacttgatttggtataaaaattaaaaatgacgttgaaaaatgtatttggaagaatttttcatgtgtctgcatcatgccacttggagctttatgtgtgtttgttgtgttagcttcatcatagtcatgagtgatgtgatgtgtattaagctttttatcccttgaaaaaacatattactacttaaaaattactttagaggctagaaagaggctcagtgattaagagctggctgctcttccacagaacagtggtttggttcccaatggtcacccacatagtggctaacggccactccgtaaatccagacccagggcatctggcattccttctggctgctattggtaccacgaatgcaggtggcatatagaccccatacacataaaaggatttgttcccccaccttctgagcccatagtagtttgtagtgatttcaagatactacaatgcagattcctctcctagggaagggtctttcagaggcaggaaactcactcagatgtataggtgttcacttctgtacacacttggctggattcttcctcttggactgctcaggagtcctgctttccccatgtgaagccaaagcaagacccagcaagtgggagcatcaccaagcaggatgtggttggtgaacacagcacagcatgaccaggacaccttgacctccactctgctgagccccactgcttctgtataaaaagcgaggagttagaattccttttgtttttaagagaatagtatatatctctatctatctatctatctatctatctatctatctatctatctatctataaccatttgttcacataatatttttcatttgagggtaaagtggccaataaaactctggggttataagataaatctttgcgcaatctttcttgttactctgctaatacttactattttccagtatggctcaaagcaacagttttctttgtattcagtggaatataatttagttttgaccataattaggttttatagcagtataaatcacctatgatatctaaataaaaaatgtttatatacagtgaagactggcagatgtctgggtccggatctccatctcagtctggttcagactcagaatctgaagaagagcgagataaaagcagctgcgacgggacagagtccgactacgagccgaaaaacaaagtcagaagccgaaagcctcagaataggtgagtacagtgttttgtgatttgattgccatttagagaatttgtttttgtatagttccttaaaatttttttatcctagcgtctgtaaaacactttttccccctttcctttctcagatctaagtcaaaaaatgggaaaaaaattcttggacaaaaaaagagacagattgattcatctgaggatgaagatgatgaagattatgataatgataaacgaagctctcgccgccaagccaccgtcaatgtgagctacaaggaggatgaagaaatgaaaactgactccgatgacctgctggaggtctgcggcgaggacgtccctcagcctgaggacgaggagtttgagacaatagagagggttatggattgcagagtggggcggaaaggaggtacggctgcaagcagtgttcagtacgtgcttgttcaactattcacagcgtaaacgaccgcgattcttaggcacattgcagttatgaaagaaagaaaagggaattctcttctcctttgcttatctactgtgaaaataggcattgcatgcccgcccatctctgaaatgtccttgtgctgtacatgtgggaaggctttgaactcagtaagcaaggaaaatagtgtttttcgtatattttaaattatttttttttatactttcaacttaaagagtttttgtttttttttgactatttcccctatgtcttaagcatacaggcttcttattattgcttaatgtatctgggaagtaaattaactaaaacagcaattcaagttactagttactgtatattaatggatgtgctgttgagtatcccattttttttttccgaaaaaaaaaatggcttattaattagaaaattttatatttcttcagtgtgcatgtggtgtgtgtgtgtgtgtgtgcatgcatgtatgtgtgtgctacagcccccatgtggtggccagaggacaacttggtgtgtgtttggtatctttatcatgtaagtcctggggatagagctcaggttgtcaggcctctgcctgcttccccagcttttaaaatgcaagacagattgaaatagctactttttagttctaaaactcttagttatcttttgtgacataatttactataatttttttgtattttaatagtttggttatttagtgagtggtttgtacacatttgaagctttaaattgggaagaaagtaacactgtaacagagtcacatggatttgtcttttgcctctagctactggtgctactacaaccatttatgctgtcgaagcagatggtgacccaaatgcaggatttgaaagaaacaaagagccaggagacatacagtatttaattaagtggaaaggatggtctcacatccacaacacatgggagacagaagagaccctgaagcagcagaacgttagagggatgaaaaaattggataattataagaaaaaagatcaagagacgaaacgatggtaacgattcctttaaaaatttttttatagttgaatattagagttacaaaactaaaaataaaatgacagcataaaatttttctagtgtatatttcctctcggtgagagtcttcagaatggcctctgaacttgtcttagagttgcacagactgtcatgctctcaaaaattttcaacgttaaaaacttataacgttggtaagaatggtagaactctgcctagaacgtgcaaggttcagtctttggccttaccacaaacaaaacaaaacaaaataaaaaaaacaacaaaggaaacgaacaaaacagaaagaaaaaaactactactaatgttctctttctacattgtttagacttgatttacaccactaaatgatacattggaagcttgtctaacagataattatcagtaagataaagtaaccgagaaaaatctgaagtctgttgttgctttaaaaattttcaggctgaaaaatgcttctccagaagatgtggaatattataattgccagcaagagcttacagatgatctacacaaacagtatcagatagtggagcgcataattggttagtggtaaatatgtgtgataacgtcttatctgtgtggtgtgtttttgagatgggatctcattatgttgtccattatggtcgtaagctcagaactcatgctcactttcctgactatctgggattaggtttgtactcccgagcttgcgttcagatatttcatctgtatttgaaatcatgtaagcaaacataagtttacctttatacacaagatacagtcgtttgcttttactaaaataaagtgtattgtatgtagatgactagttttcacttgtgtagcctttactgagtatgcctgtgatgtaatttaatataaataaaatgagtacctgattcatctcacagctcattccaatcaaaaatcagcagctggtcttcctgattattattgcaaatggcaggggcttccatactcagagtgcagctgggaggatggagctctcatttccaaaaagtttcagacatgcatcgatgaatattttagcaggaatcagtcaaaaacgacaccttttaaagattgcaaagtgagtaccaacattttaaattaatgcatatgtgtgtgttttgtttcaagcctgtatagagtgtggaatcctgatgtcatacaggctaaacaagtacttagttgagtatgcctgttagaggaactgatatttctctagtggtgctaggttaaaatatgataaattggtggtaatgattgtgtgtagactgcataaagaaaatttccttggaaattgaaagtatatgcttggtttagaagtagcagagattgctgctgaaactgagagcagaaaccagggcctgagagactgactgtctagggctgtcttctctaaactttggaaacttacgtaaaaatattagtgatagttttaaagtctagttactactttattacaggattgaatagattcatagtggtattttgaaaatcatatggagtagaagtcttataaattattcatagttcatggttggagcaatggctataaatgaatttgactcctttttgaagtgcttgacatatgtgtattgttgggactgtatttcctcagtaatccccccacccccacaaaaggcaaaatatttattctacattcttgctagagtcatagaaaataaccatgaacaaatgaatcatcagatacatatgtatatttttgttttgcttgagtgctggcatctgtggaagatgtgggatattataattgccagcaagagtttaggagtgatctacatgtcagatagtggagggtagaattaattaatagtaaatatttgatgaagctgttatctgttggggttttgagctgggattctgttaccttgcccatgccagcgttgagctcgggaccctcatgcttcatgtgtttagtgataagtctttttgtctcacctgttgagtgggcagattatgggtccatactatagtacttggcttcttatacattttgaattatagaacctctgaaactaataattaaaataaatgttaatgtttatggtgaaagatagtctaaaggacattaatcttttttgcatgatatcttatattctgcatattaatatttattctgaccaaaggtgttgaaacaaagaccaagatttgtagctctgaagaaacaaccatcctatattggaggacatgagggcttagaactgagagactatcagctgaatggtttaaactggctcgctcactcttggtgcaagtaagtgtttgctgagttacctcctcacccgggacagcgagactccccgtctttgcaggttgctagtctcctctcacagccacctagaggggtcagaggttccataagctgaaagactgcagcaaagcagtgtttacttgaggttatttgcaggcagccctacagttctgatttagggtctgcagcagacatcagagaaatatttcccttcattttaatgcattcagccaaacatgtcagatttgacttaagtcttctaagtggagccagggagcagagtgaacgttgtaattgtcagtgggaagtgttttgagagttttttagatggtttcacgtcttttagttttacaaccctgagtcagaatcttactggtttcttgacagtcggtctctctctgtctctctatctctctctctctcttcttccctccctccctgtctccctcgctccctctgtcccttcctccttccctccctccacccctctcccccccatccctgcaggtggtaaaaggcataggcagccctgtttcttcctgctgcctcattgtgttttcaccatgtgcagtgagggagggcatggatgggattagtaataacagcagagaagctggaggagtgaaacaggttctataaatacataatttagggatgatgatttctgttaataaagtttgagtttaacttatttgatgattaccattcctaaatgtttttattcaaatggaaaaattatttatgttgtcatctacacttctgaaatagttccccattccctagtacttcctagttgccggcctttccctgcctcccctcgtccctgttctgaagtcctcaactccttagggtgtggtttagctttgcatttccttccacttttgttcttcctagatccttattacttactaccatatctacagaccgcttaatgctagaggataaactgcagtattgactttgtaattaagagtggtaatattaaatattaaagcaaaatctggccttaaatgttacttgctattcatcttacctttcctacgatgttagtgattatgtcttttggtaagattttatatttattgtatgttgttgattgaaatagtgtcttgcataaaatacctcatatatatatgtgtgtgtgtgtgtgtgtatatatgtatatatatatatatatatatatatagttttatacaacttgatataaatgggagacataacagaaaaacaatttttaatgaatttatacctttactgcatacatggattttgtttttttttaactttatagaggaaatagttgcatacttgctgatgaaatgggccttgggaaaacaatacagacgatctcatttttgaactatttgttccatgaacatcagttatatgggccttttctactagttgtcccgctctccacactgacttcctggcagagggagattcagacgtgggcgtctcagatgaatgctgtggtttacttaggcgacattaacagcagaaacatggtaagttgtctttccatgaacttagtaggctagacagatctatctgaggataagtgtgtggtttgtttcctgtgtgcatgtgtgtgtatgtctccatgttctcaattctgtcatgtaacttgctacaaagaagtgcctagcacttgcttagttggttataataaaaatcaagctatgcgactgcaaggtgcctcagtgggtaaagggattgtcacctagcccaacaacctgtgtttgattccttaaattgtcctctgacctctatacgtatacaggtacacaaacacaataaataaatgaataaataaatgtaacaagtttaaaagtcattcttggctcaggtatagtttgatatgtatgcatgtatatatatgtgttgcatgtacatagaaacatgcacacatacacactcccctacacctttttttgaggtccaggatagctttgaactcaaaatcttcttgttttagcttctcatgtgttagcgttatagacatttgccacatatacatatacaagcacatgcatacatgcatatattatgatatatataaattatattttttcttttgtgtgaaagttcaaatattcatgagaacagttttcagagtgcaatgaacattcatatattttctttcctagttttataatattaactggttattaatcttgtttcatatataatatatatacatatatactatatatatccttgcagttaggcgagatgaagcttagatggcatatttcatccacaaatattaataagcgaattatttgttttacaacaaacctttatttaatgaatgtaataaaataaggtttgctccattttttttaaaataagatttaagttctgcatgccatgtttaactctataaagcagtattaacttttattacatcttttttgtgtgtgtatcttaaatggcttttaattcattttagatacttaagtagaactgtataatttgctagatatttcttttaaatttcttcttaaatttttataatagataagaactcatgaatggatgcatccccagaccaaacggttaaaatttaatatacttttaacaacgtatgaaattttattgaaggataaggtatgtgttacttgtgtaactgttttctgcttacagttttgctgtattgtgtgttgtgggtcagaatgaaaggctattaaagtcatagaacagatctgcaaaccgtagccttggatctttttaaaaattgttttgttttctactttttaatttttaaatggcccttgagctaagagtgaattttgtattttagaaagatacgccccccccccccccccgactctgtagccctggctgtcctggaactcactttgtagaccaggctggcctcgaaatcagaaatctgcctgcctctgcctcccgagtgctgggattaaaggcatgtgccaccacacctggctagaaagattttaaaggagttccttacagggttatattgaaatgatgtgatggagcacattcgtctaaaatatttttcatctctatttttagaaaaactttaccaattcttacttaaatggaggctagttgttagtgtctgttctgtctaacattttaaaaatagaggaagaggcctatcccagtgtctgttaatacagactgataaaacactcaccgaagcaacttagggaggggagaattcatttgacatggttatcatgcaggaagtcagggcaggagctcaggcagagagcaggagttcagggtagaaatcggggcaggcggcacttgcttgcctgatgtcaagttcatgctcagttagctttcatatacagtgcaggatcacctgcctagggtcgccaccggcttctgtggtctcagctcttcagtagttgttaacagtcaagacatggcagcaggccagtcaactgaggcttctttgctcagataacgctagactattatgttgaccagtacagtgcctaacagcgttgtctcattaattcttctgcctactttggtattctttctttagtgagaagcctgttctcttacgagctccatgaactcgtcacacagctattaatagtggaatcaggcctctctttatttcaggtctcaagagacctaaattcatgtattagaaacctacattttgtaaaagtcatatgtacttgaagcatgatactgtttcaggttgacattcttagagacttttgttggatttagactgaaaatcttgtgtaaaattttgagtaggtggtatcagcttccttccttttttgcttattatgtaagctaaaatagactgatagtctcttttctaatagtgaaattaataattgaagcaattttattttgcgtgataagttgcttgatttgaggattccagttcagtcataaaatatgtgttggttttggttcttagtgtttcctctgagttaccctggtagttctagaactctccagaccagtgtggtcttgaactcagagatccacctaactctgccttccaaatgctgagattaaaattatagtttctgattttaatttacttctttttagtaatagtaagttcaaatcaaatgaaaaagttaaatttcaattcttacctctctaaatatactaactgtttttttattcattttaaggcattccttggtggtctgaattgggcattcataggtgttgatgaagcgcatcgattaaagaatgatgattcccttctgtacaaaactttaatcgactttaaatctaaccatcgccttctgatcactggaacccctctacagaactccctgaaggagctctggtcactgctgcacttcattatgccggagaagtaagacgacatgtggacacggcttgcttcatggttttatgtgctcagatgcagttgggagaaatgttacaggatcgagttcataatttaaatgacattgggtcacagatcattaaaaatgaaaaagaaaatgggatggaattaattttggatttctaagtttagattttgtaattctaatataaaatcttcatagtatacagtagaacttattgtgtgtatgagtggtttgcctccatgtatgtatatataccatgtacatgcagtaacagttacaatatccagacactgctagtaatctgattttgtaaatgaaaactagaccagaaaattaaataatttgtcctaggtcacatacacattcatttttcaatatgtcttgaactttacgtggttgttttgagaaatattttagtgacaattgtgtccttgaagaatttaattcaagagcaatcattataacttactcatatttaatcttctgcaagatgagcctagtatatcatacgtggtaggggagcagcctgccatgagttacatctcccgcccccgtttttacttttggttttgaggtaggatctcccgaggtttcccaggctggccttcaatacactaactcaggttggatcatatatgcccactcacctatgcacatagataacatatatacttacacatatatgtcttgtgtgtgcgcgcatgtgtgtgtgtgtaggaggaactttttgcatgggtctcaagactttgaggtgactaattttagttttatatacacttttgcttattatttgtaactgttcttaaattttttaaaggttttcttcatgggaagattttgaagaagaacatggcaaaggcagagaatatggttatgcaagcctccacaaggagcttgagccatttctgttacgcagagttaagaaagatgtggaaaaatctcttcctgccaaggtggagcagattttaagaatggagatgagtgctttacagaagcaatattacaagtaagcctgggagagagtgtgggactcagagttagctgtccttgttctggtggggtgtgtgtcctcacgcacaggctcttagagcagcagcagcttcagctactcaggttaaaatacatttattctggggctgattagcagggagctttagtgctgggtccacgattaaatcattgtcttcaaagactgacctgtatgtatatgatgtgtgagtctttgtttgcatgtatggatgtgtaccatgtacatgcctggggtctggtacgcaggccagagtagagcctgagtgccactggaacccaggttacggatgcttgggaacttgcatatgggaacttgcgtatgggtagtgggacttctgtgagggcagcgagtgctcttcaccagtgagccatctctcctgctcctaagctaacataccattatgtatgcccctcttcatactttttacctttcaacaagcttgataaatccatcaattgtggtaattgacagagctaaagaaaccttagacaaaattttagcttcccccttccttttttgaagaacacgaacaagttatattttgtgtaagtttcttgtcaaatttatatagtaacttttcaaaggataaaaccaaaaatatgtcctaacatctttctgatatttacttgtacaaagaaatacattgtgactatatttggaatcttaagtaccatgcacttacaaatgggtttaggtgggtgttatggtgcctgctgtggtcagagggcttgaggctgccagtctagtactttacttagtgaggtccaggcaaagctggactgtagagcatggccctgcctcacaaacgtcccaagcacctgggatcaaagttcgagtttgtcagtaccctcgctccttctgtttctcctttccaaacaccgcagaggtgctttggcttatctacatttcttcatgtagctctaataatttctaaagatactgttacccaccctaacattttaacatgttacttatgtattttctcaaagatttatttatttatttatttatttatttatttatttatttatttataaataatgtaagtacactgttgctgtttctagacacacaccagaagagggaattggatcccattataggtgattgtgagccaccatgtggttgctgggaattgaactcagaacctctggaagagcagtcagtgctcttaaccgctgagccatctttccagtccttaatatttttttgatgtcagtgttcagtaaagcttttgctgtgttgcctcaaagtttaaattttgcttatgtcagaaatgaattacgatctttctgtaataattaagtgcctccttgtagatgtctgtctcccttaaaattccttggataaggaaacatttttctaagtaaatttttcactgtagacttttgtagtatatttttgtggaatctttaaaaatattctttttatttcctgtagatcaactgcttgtttagatttgagtttttatggagagaatgttttataatggaaaagagtgatattaagtattttttgttgtgtgtggaaaattaggaaaatttaaaaattgaaaagaattttaacagttaaaaggagaaagaagatataacccctatagcttctgggtacttttttgcagttactatcgtaacaaaatgtggctttaaatatttatgtacctccttcagggttgggggtgaggtggagaacaggcctgactgatgcttaaattagccttgaaagagtgccataaatttgtgtaaaaagtttttagagtatctcctccagaaacacaggagatattctgagaatagttaaataagctttgagcctgtaatacctccttcagaatcaagcattgtacatggactcctgtttgcttcttagttaagtcaggcaaatgataagtaagtagtagaaaagaaagataataaaagaatacctagatattttggtatttttaattctattcataaggtaaatttatgaaaaaggaagttagtaataggtaactaaagtaggttttgaagagaagaattgtatgtggtttgaagtgtttttcaagttgcatgggtattacataattgcaatttagagaggacagcgtgactaaagccgggtattttcatgagactcggtggaaaagatgtggttctaattgtttgatggaatgaaatttctagaagattgatgctgtggctcactgtccacagctctcagggaaacgatgaatgtctttattacactacagaaagccttggtacatggttgatggatcagacaggttatgtgtccggcttttttttgttttgttttgttttgttttgtttttggtttttggtttttctggacagggtttctctgtgtagccctggctgtcctggaactctgtagaccaggctggtctcgaactcagaaatctgcctgcctccgcctccctagtgctgggattaaaggcgtgcgccacccccgccccatgtgtccgttctgagtctgacatatgaggttcagtgcatcctgggtgtaaccacgagcttcaggatgatgactaatgctggttttaagctttcacaatttatctttgtgatctgctgaatattgtttatgtgtcttttgtttttgaaggtggattttaactaggaattacaaagccctcagcaaaggttccaagggcagtacctcaggctttttgaacattatgatggagctaaagaaatgttgtaaccattgctacctcattaaaccaccagataataatgaattctataataaacaggaggccttacaagtaagactttttaactatttctattgctaaagcagaattctaagaatatgtatttcagttttaggataaaaatagtagagtaatttaatatattcatgtcaagttctctttggttaatgtttcatttaagtgatggtgttattatttgtatttatgaaagcttttaaaattataatttataaacatacaagtctttcaaaccagtgagttgtttctatttatcagacaaaatctattagtgtcttagagattgtgatatggctaaatctgactgtaaatagtagcctaaaggagggctttccttcatagatgttacccctctgttactgttgagaggcagttcagacgtgaagacacacttggaattcagtcacagtagttcattgaggagtgagcatccctgaattagaaaagaatatgtttgcttgctctgtgtttgtttagttgcttttttttttttaatgtatgtttgttttggctaaatcttagagaagtagtgtaagagctggcaagtagaatgatacagcagaaataatagtcttgttatgcctggttagggcaggtttgatgtacgtaatagaggaagatgggaaaagctctagacagttttgaaagccaaagtaacttttctcttcagcattctgaaaagcttaaactctaaactggatagagtagaaacaactgcattattccgtggggctctggactgtttcctgctttaccacgttgtaataggtgtactctgctgtttccttagcacttaatccgtagtagcggaaaactcatccttctcgacaagctgttgattcgcctaagagaaagaggcaaccgagtgctcattttctctcagatggtgcggatgttagacatactcgcagagtatttgaagtaccgccagttcccctttcaagtaagcatttcttggtttctatttttcattgtattcttgggcttattttattgagtcactttttagattattttgcatataaattatatttctcttaaacatacttagagaatcatttgttacttttctaagtttcttttttttctctaaattttattttaattttgtttttatgttgtatattgttaaaagctggactaaagtggtatttctgtgctaagatgggtctgaagggcaagctttgggaagtaagatgacgtctgaaaagagaagctgtccttggacacatgcaggctggtcgggctgtaatgctctgtgtgctgtgggaagccttttgtgtggtttgccaaaaaaaagttgagcagggctcagataagaacaggctgacatcctgtctactttcgattcacagtgaagttcgttcagtgggattaaaacctacaccgatgagtgttttagtgttagggtcaggtcctattctcagtacattatacctcgtagtgatttctttgtcattaattttgtgtttatgcgtgtgagggtgtgtgcatgtgtgtttgtgctttggtgctcttgtgggggtcagagaacagttttgtagagtcaggccttccacattcattcgggctccagggcttggactcaggttcctaggctggctttttactgtgtcgtcttactggcctcttggaatagtaccgggagtacagctaactctctgtgcacacgactggtacacgatggatgtttactgtaggcagaggagttagactgagagttagtgtacagggtcgctctgttgaagttgctcacactgtgctacatgtagtttgaaagtaggagtactatacctttatgtgttggtgatattagcacaataaaaacacagtaatagtaatatactgggaacagaatgcagcgctactgtagttaagaaccgttagcacaccctcaggtggagagctatacttaagtcatgtcacagtaaatgatgcagaggttttattaattgcaatttgtattttaatggaaaagaaacacaaattagatttggaagaaagcttagagcactgttcttaaaccactgaaaattatttccttaaaattttttcttgggactggacagatagaaaatggaagcaaatacttcctttgtgtggctcacagcaagctgactctccaccttcatgggatcttacaccctcttctggcttctgagggaatttgcatgcatatgtgcatatacacatatgaacaaaaataaaataaagtgttcagagttaaaagtacaatataatgtaatatagaaacattagtaaaattctaactttccctttcttctataactcaggctgtctttgtattcaccatgtttacagattagtgacttttatctcccttaagcaccagggcatttgcagccatgcttggtttgtatggtgctgtggaatgagctgagcgactggtgcaggctaagtgttctacaaaccagctacatcaccccccttcttcctactttttagataacagggtcttgttcatggtggctttgaacaagatcctcccacttctgctgcctaagatgctccagagctcagggtatcttaagaagtcgatgctgggggctagaaagtgctcagcagttaaagcactcgctgcttctctgcgagaggatctgagttcagttgctagcactgtcatttgtagttccagctgatctgacatcctctactggccttctcggacaaatagacccacacacgcactcataaataaacataaaaatgaactttagacatatcgttaacatatactgtctcttcattttccaagacagtttgtctaacagcaataaagtattgaggtctgggaacaaaatgggaaccttgcacggtacggggacaagagagcgaatctgaatggctggtagattggtgataacagatttagcagatttaaagaagcagagtagtgccaggcagtgatggcacatgcctttaatcccagcacttgggaggcagaggcaggcggatttctgagttcgaggccagcctggtctacagagtgagttccaggacagccagggctacacagagaaaccctctctcaagccccccctcgccaccccccccccaaaaaaaaaagaaaaaagaagcagagtagtaagccatcaatgtgaagtgttagatgctcactagcctatatttcagagactatgagtttaggaattcttaatagcagttctgtgagtggaagcaggtaaggcttgctgggcatcttattgtcagcatttaatcccagcaatggggagacagaggcaggcagatctctgagttcaagactagccagaaatgcacagaccatactcagaagcaaccatgcaagcaaacttgttttacctctactctgttggaacttgaaacttaattaagttatagcctaggtttcagtttgattggtcttgttttatgggataaacccaaaatgaatgaaacaaccaaaaatacactttcttctgtgtttttttttttttttttttttttttttgggatactgaggtaaaagttagtgccttgtatgtactgggaaagtatactactactgagccacactcctagaaacctaaaaacatttttgtatatgttttcctgcatttttgtctttattgttgtagatagtgtcataattcttgcttgtctgcctcttgctggtttaccgaagtgctataggtacttgctcattcatctggcttgtaagcgaagttgctttagactttgcatttcttttttttttttttttccttttgaataactttttttgggagagttctgtagcattaggaacattataaaatgacacaccgctgttgacagtggaaaaaaaaacagcatttgatctcttccagctttataagttaaaaaaatgattcagttacaacagcaaaataggcttagatagtttagcaagtatcaccttgcaggaccataatcacatttaagccactgacttgctgtaaatggagaaggttcacactgcatctagttactatagtatttctaagcatgatcacagctagaatttgcatttcttaagcagtcattatctcctaataatgattgacatttgtgctaattgttagagctatttttcctctaatactactgaaaatgataatggtccaacaatgattataactttcattatgaatacatttctgcatactagtaaagatagcagagcttggcatattgcttcccaaaatagtaccttaatacatcacttaaaagcttggctcatgggctgcagatgtagcttaagtcataaagtgcttgcctcacatgggtgagactctgggttaatattcagtgttccaaaaccaaaaaagaatggattggagtagcaagttagacctagtgtacagccaatcgtatttatgtaactgcccctccccccacgccagggactgaaccggaagcctctcctacactgggcaaatgctttctgctatgaagttacaccccgtattcagaaatagttaatccttagtaagagcttgattggctgcggggcactgtattgtttcctcattgggtcttcttcactgtgaaggaacgggtgaggggaaagttgagtcacttgctgaagttgtccacacctatgccgcttggccaggtgcttgaccccatgcatttccaacctgagcactcacagaatcattaggtgtttgctgcgctctagcgctaggacgtctgattcagcaggcctgggttgggacttgggaaccacagtttctttgttctcaggagttctaatgctgttacactggacttggtgattttagttgttaacatttgaatgtggtttgtgaagtattttaaatgctttattgtagagattagatggatcgataaaaggggagctgaggaagcaggctttggatcactttaatgccgagggctcagaggtatgaatgcctttaaattttatacctgtggtttttttaagagttggtgctggtttgcttttattagcttttaggtttattatatgttaaatttgatatgtcagtagtatttcaacatattacagttaatttacttcaatataaatcagccctttatcattagaatttgttgtgtgacttgtacttgttaagagaaaacattactgccacatttcaacccttcctgtttttatctgaagtgaagtattatgctgaattttatgtttgttattgctacatggctttatgtgttgaaatcttgtttattgatcctcatgaagatttacatattagttactgttgttgtttacatgttttgagggtggcgcccagagcgttgtgctttttcatgtgcactacttgagccacagaccggcactacttaatttttaatgttgccattcattttaatagtatcactaataaaacacttcaagttcataaagtcagttgtaaaatgacttggagtcatgttggtcacagcttagatctgaaattttgtatatttaaaattccttgcaggatttctgctttttgctttctacccgagctgggggtttaggcattaacctagcctctgctgacaccgttgttatattcgattctgattggaatccacaaaatgatcttcaggctcaggcaagagctcaccgaattggacagaagaaacaggtattttaatttgttattggacttgtattatatttttctaaatatagtataaaaactgcaatctcaagcttgactgggataatggagactcccgaggcccagccatgccgtctttgtcgagcagctggactccacaatggacagaaccaagagaccctactatcagggtctgcactcagtttagattgtaactagagtgagtgtcaccttttcagtatagaaacttcatttgttggcattctttatcaacctttgatagttcaagttcacagttctctgcacacaggagccagccccatctgaccggtctttgtactactaactgctgctgtttgaacaaaacaagggcaggtgttcctttggccagtgacacaggaagttaaagctttgttcacagtggggcttctcttagcgtgtagttcatatagctctgttgtctatgcagtttaatagaaagcacttacgtaaaatacagcaaccattagaatcaaagaaactatataaagatagtcagaggtttgtagggttttcccttttttccccaccagataaattagaatttaaaagtaaaccatttctgcaggtagagatggcgcagtgcttcagagcacctgggctctcttcttagcacccacactaagtctcacaaccagccctgggggttgttcttctagcctctgtgggcaccaagatggatgtggtacatagatatatatgcaggcaaagcacccatacacataaaaaatactaaagatcatttcttgtttttttatatataaaaataaacaaataaaatttcctaagaaatgtatgaagagtagcagaagtcagagaactgcctgaattgacagaattttgtgggagatgtgggctcagccatcagggaggtggctcacatgaccaaccttccacagccatctagaaccttcagcgatcagcttccagttggggtggagtctgataagagaataacgtgtctggaaggtcaagtcacatgactattctgtgggggctaaggggtggtatcccttttgactcagcaatggtggtctgctaactgctcagacttacttacaggaaggtcacgtgacccgctaccacattgcctcactttccctctgacatttcctgaagtcaagcagcaccaacctcagttcggttctcgttgtctatgtggctcattttttagaaatatacccagagtgtgctctgcggcactaaagcagagccgcagtggggagggggaggggatgaaggaaagagtcaaatcaggttttaaatggcagagcctttacctttggaaatgacatgtggttaccaagttcgatatttttgttttacattgacagttttaaaccttagtagaggaggagtctatttttgcactactgtttggacacttagttatcaagaggccttattactgcagcttacttctcatgcttgcttttacaggtgaatatatatcgcttggttacaaagggatcagttgaagaagatattcttgaaagggccaaaaagaaaatggttttggatcatcttgttattcaaagaatggataccactgggaagacagtgctgcacacaggctcggctccgtcaaggtgggtactgctctgtaagagaaatgctgtgggggaggggccaccccaaacccaggtaaataaattgcactgtgctgtagtgtggttaattttatacttttaaagacgttagactggtgccttgcttgactgttacagatagatcgcacagaggaattctaatttccatgtttcgtagttttaaaataactagattaaaacttcacccacatgactccctcatcacttataaagcaactatactgaatatgctctgcaaatattgctgtaaagattgaatttgtgtttttcatgtttccagttccacccccttcaataaagaggagttatccgccattttaaaattcggtgctgaggagctctttaaggagcctgaaggagaggagcaggagccacaggtcagcagcgtccatctcccatcggactccgtgttgtctggtagagcagggggagtgcacgtgtacttaaaataaccacacccttttaatacaggaaatggatatcgatgaaatcctgaagagagccgagactcacgagaacgagccaggcccactgagtgtgggggatgagctgctttctcagtttaaggtagacctcttcctccttccttcttcacaactgcacactgctgagggttgagctagtgtttccatatctttctttaaaaggaagtaacaagatagttttcatgttaaagtattctgtattgtacaaaagtttgtgctcagtcaaaccatcagcacctcggatgaccagattggttatgggtaattacattcattatgtgcagtgggttcctaatttacagccaggatgactcttaaaacaacagcatgctctgcatattaagggcaatacatgcatgagtgtgaactttattcacatttccatgactcagctgctattttaggtagtttttttttttttattccttggaaattttatatatttgtacagtatattttaattatacctatgtattgccacaactcacatcccctgagtgcaccctctttgcctccttcacaacttggatttttattgagttagatttcaacaaaactcaattgaagaattatcaaaaataagagcactccagaaaatgagaccgagttagtaactgccatgacacttgtccatatcactggcctgctgaggtcagacacagcgtaagtcacatgatttcagggaggaaggtgagtgagtagtggttattttttgtttgtttttttaaagaagcaggttactgggctagagaaatggcttaagcctttaaggctcaggctaatataataataataataataataataataataataataataataataaaaagacaaactgattcccccgccagtctctgtggactgaagttcttagggatcactcggcaactgttcattccatggcactcactgcactctaggaatgccagggacttagaagtcagtcactcctctggagggtggagggtggacttggaaggcaataaagtggaagacaaaatggaataaagatttctgaagctgtcactctgggcttgatcttgcaaattgtttttcctatgattatgttgtacttgatttactgctggttgcgaagaggcaaagagaatcacaactcactaataactagaatatatggaggttatttgtacaccggtgaattagtactcttagatggttagctacctattaaggctacctatttgcttaatttatttttatttatttgtctttttttttttgaggcaaggacttatagaaagcttgcttgcctgaaacttgttaccttcttttttttttaagatttatttatttattatatgtaagtacactttagctgtcttcagtcactccagaagagggcgccagatctcgttacggatggttgtgagccaccatgtggttggtgggattcgaactctggaccttcagaagagcagtcggtgctcttaaccactgagccatctcaccagccccttgttaccttcttgatgcagcctcctgtgtattttgattacagatgtgcactcccatgcctgggcacattttaatattagagaataaacaccttcagcctctttgtttttatgaacagtaggcattacttttcttattttcattattgtgtttgcattcaaatattagtattgatagatagtcttaatgagtgttgactgaatatcatcttagaactttaaatgtatgaagttgtcctcacaaaagatagtgtttgtccatccctttacaagtgggaaagaaggaagccaaggtctagaaagctagttacttacctaaggttgcctttgcgaatctatcaactacccttgtgctgtttttatcaacggggaggagggttctttggcactcagcgttcataggaaagggattccttcagcattttagtaatatacttcacagcttggtcattttattaactaccagtttgtcatctcccttgagttctgttattaattactaatattgctgaacataggtcagagaattgttgctggagggaggaattgtagaagtcagttggtcttgtctactttgctctgatgaagaaataactagctagttatagttagcaggcatcagagtttagttcgcagtggtaggctgctgctcaggaaggctgggctccgtctcctaactcagctccgtctctcccttaaaagagtaaatttgtgaattagagttcaatattatatactatacttactctgttaaaattctggaatttattaggttgccaatttttcaaatatggatgaagatgacattgaattggaacctgaaagaaattcaaagaactgggaggagatcattccagaagagcaaagacggcgactagaagaggaggagagacaaaaggaactggaggaaatttatatgctcccgagaatgagaaactgtgcaaagcaggtgatgtcattttagaatactgttacatagcagtatcttggaggagttacagtgaaatgctcttcttgtttggttataaataattcataactttgtttctcttaatgtctttgatagtttgcttgtaaaaagagttgaaaggcgtttcctcctattttggtgaatttatgtagatctgggaatttccctttattaaatgatgggattattttcaggtaaactcttggtctatagtttttgttgttggaagatttccatttcttttatgaataagaactgtttctttttgagtttgatagtttcttctgaagaatatgggttttttttctctgttgaatttataggagagtttaacttactatttttgtgtcttggtgatgcatgccagtttatttctaatattggtaatctttttctttgtaaccttgcccactttgttcctgggataacaactttgagagttaattatatatgaataaatgtttagtccaaaagcttaggcatgttttctgactagcatgtaaacatatttacccatttattctggtctttgtcgtccatgtggctagttacctctcctcaggtttatgcagctgtcggtgttcagggggaattctcacccaacccccccccccccccccaatttctctgctgaaattctcacctcctattttcttccttagtagctcattggccatagactttcatacagttcataagagattctctctacatttcttgatcattctaagtagagctttatttttcaaagaataaactttgtttcatttctgtttttatgtttctattctttaacatttctttttgattttgatttaatttgttcttttaatttttttgagatgtgaaattgaacagtaggattaatcttctattaccatccagtgctgaaattttctttagcttctttgatccataatttaattggggattttttttctattatgtaaagaaaaacacccaagatttcatgtcttctttcattagaatattgcattttaagattgtcttaattattggatttttccttttggggagggaacattactacatttgaaatgagaaacttctttctgtcctttgccattcacccaagggaaaataatttattgtcgtctgtgaagtcttcccctgccttccccctcccccgcccgcagtcagtgagtgaaaggtctctcaggcctgctgcctgtcttggaagagctaatttctatgtttgcttaggcttgtggtccagaggccaggtttcccaggtcactcacctgctggtctttattaaatgcccagtgtaggtttgagcaggtctccctgcatgccttgaccaggtgtctgcgttctcatgtttttcttgaaaatgtctgatcagcttatttagaaaagcaatagagggtatttagaagaaaaataaaaaaataaattaaaaaaaaaaaagggaaagcgtgtgtctccaggggtatgcctggcaatgctctgtgccatgtattgccgcagtgttaaatcaccctcgtttgacaaggtggcttaaactcatgctaacttggaacttgtgttctccccttggacagcgtatcatgaatgtcaaccctacaacagggtccatcagctcctcagtgttctagcctgtggactactctgtccagttcctctttagtaaatgtctgggttcctttgtttttctttatgtgaagaattttactggacaatgcagcttcacatttctggtctcaggaaaatgtccagaagtgacacgtcagaatcagcagaccggtgacttttgatgcttaggataaaatattgtcaagtagcctgttgcttaggtaagcaacagaaatacaagaattgtacctagtgtccagttttgtagcattacgtagtggccgttattgctcatttactgtttatcaagttgataggttttcaaagaaattacatatatttcctttttttttaaattataactgagctcatgtagttttgtatttatgctaggttgccagttagtagccattatcatatttttacagaaagctggtgtttggttgatttagtcattacattttattttattctctctctcttttttttttccctatggttttttgaggcacgatttctctgtgtagtcctggctttcctggaactcactttgtagaccaggctggcctcgaactcagaaatccacctgcctctgcctcccgagtgctgggattaaaggcgtgcgccgccacgcccggctttattttattctctatttgattaattaattttggctttggaatgttttccatatgtggactaatgttcttaaatttttaattgtagttcactgtgtttgtctttgcctctaaaatactagctttctttaccctgtatttaaggatatttttgtttctattttccagataagtttcaatggaagtgaagggaggcggagtagaagcaggagatattctggatctgatagtgattcaatctcggaaaggaaacggccgaagaaacgtgggcgaccccgcactatccctcgggagaatattaaaggatttagtgatgcggagattcggcggtaagaggacacagaccactttctttaacgtggtgtttttagaacatgagactaactgtgaaaactagattgggaggttttagagggtaaaaatagacacctgtgcaggagctgggctgttctgctgagatattgattataactggaagaaaggtgtaacatctcatgcttgcacattatttattgttacaccacttgtatattaaaattattttccctaactgtagttcaggatgaccctttgaacaataaaagtacatgttagcacagttcatgttacagctacattcccaggcattactaattttgcaggtgattaatttagctatttttcttgttcaacattgaggtgattgtgtttttgaaagtagtcattcattcctggggctgggatggaactcagcagtagagctcagactttacctgtgtaagatcctgggtgcatcctcagcaccgctaagaaggcctctggtctaggcaagtagaagtggaaggcagcctggccaggaggctgagcccgcctcttcccagagcacccagagtgcgcaggtctccaagggagagaagagcttagctgggcagtggcttcacctgtaaagtttgataaaagcttgtgcatttttatgttttagaagtttgtttctttcaagttatttttaactcttttcctttaaatcatagacctgacaaagcccttcctcattgttcctacaagaaaactaagtgcattgttagttttcattaagggaacctttatggccatctgatttgctggactttctgtctttagttgaagaagcatttcatcttctactttctggatattttccctcatccatcaaccacttaagttgctttgttgtgatgtaaatttttgtttactgttgttggtataatagtcatccgaattaaacccttcaagtaaatcttggccagcttaggatgcgatgaggtgtgatggttggtaatcattttggagacaattcctcttgtggtagctttgaacatttttttttgtcttataaaaataataaagtaatttctaaaataaaaattagcttctattgttttatttatattgatatcttagcttcttgggtgattcagtgttatgtttgctgtaacttaatgccctaacaatttatagcttagtttcttcttttcttaactcagggaacaataccttagattaagttttttgtttgtttgatttggctttgttattttgacatagggtctcatgtagctcaggttgtcctggaactcctgacccccttgcctcccacctcccaagtgctagaattatagacttgcaccactatgcctgacttcaggtgtcttcttatttttatatgttatgaatacagagtggggtgtgtgtgtgtgtgtgtgtgtgtgtgtgtgcacctgtttgtctatgtctgtggttattgtttttgttttttacaatgttggaaatcaaatccaggaccttttttgtgcattcttggctgtatatcactgagctacatcctgtctacttaaatattaaaaaaacaaactatatatgtatacatgtgtgtgtgtgtgtgtgtatatatatatatatacatatatatatatgaaaaatatataatacatataaaatatatctgtataaaacatgtttgaaccaaaaatttattttctgttaggtttatcaagagctataagaaatttggtggccccctggagaggtaaatacacttgttaattctcatacagttataaaatatgtaatgtattgttatgattatgtagttaccagtcagtttagctgcttgattgaatttgcttttaataagtgtttttaaaaatcggtaaaaacctaattgctgattgattattaaaaatgtatgattgagtctctagaattttcttatctttaaatgtcagcaaaatattccataaattatattttgatagctgcaatgtattttcagtatttatctttttttcattaactacttaagaaagagtacagattttctgtctacagagggactaagttactagcatgtctgactttttttaatcttttgtagtagtaatgtcaccaatgcagggcagcaaagacttatttctttctcattaaaatttacaatataaatatacattctactgtattttgagctagattgcttaaaatgcaatgatatttgtgtgattattttagatggtagaaataactataaatgttaatctttgtaggttttatggtaatacaaatttcaggacatttttatttataattgtcataaaattatgtcactctttttcaatcagattggaacagatttttaatagttggtatatataatctccaggagcctaccatttgactgtaataaaatctttaccattattaatgctcatgagtgtgagatgaattgattctctgccaagttgtcctagatatatgaattagaatttacaagataggcaagagtgtttttgtattgtatcacttcatttaacatgtttaactgaaagccatattgttttattacaggttagatgcaattgctcgagatgctgaattggttgataagtcagaaacagatctcagaagactaggagaactggtgcataatggttgtgttaaagctttaaaagacagttcttcaggaacagagcgagcaggtaaatacctccagttagcctgctttgtcactctgaaagatgcttgccgttctgagtactggacatgcagagagcagagctgcagttaggtaacgagtctgtccgttagtgtgcctgctgtgttctgcataggccacagctccggcatcactgtcatgctgtcctttgaggacctgcctggatggatagagcgtgtgtattcgtgcacagtgatttcctcattcatctcgtgaggaagatttaataatctgacgatgcactgaagaaatcactgtgaagttcccacctaggggtactggcgccaagtctccctcttgtacctaccaaaacagtcatagagggactctaaagtcacatcttctgatttagtatgtatagagaaatttaagaattgatttttagtttaaaaaaaagagtaatacacattgacataagtaatggcatgctgctttgtgttttgtagaatcatatatgaatgtatagatatatgtgttatgtttttctgtattattgtttaaaaaatcaaggtggcagacttggaaaagtgaaggggccaacattccgcatctctggagtccaagtgaatgccaagctggtcattgcccatgaggatgagctgatccctctgcataagtccatcccttcggacccggaggagaggaagcagtgagtaccccctgggcctcactcggggacagggtggggctctcttctgaacatgtgcagcatggttatgacactgactgtgaataaaaaagttttagttactaaaattgtaaaaaattatatttttgatccttaataacttgaagtaactactgtctttaatactaggtatacaatcccctgccatacaaaggctgcgcactttgatatagactggggcaaagaagatgattctaatttgttaattggtatctatgagtatggctatggaagctgggaaatgattaaaatggatccagacctcagtttaacacacaaggtactcacgttttcttgactctgttaagacctcagtttaacacacaaagtactcacgttttcttgactctgttaagacctcagtttaacacacaaggtactcacattttcttgactctgttaatatctgctgtgagttcctttaattgttataaattactttgaagataagtttaactaagaataaggaaataaagactctaattctgtgatttatggtttatagcttgggtcttatgaagtaattgaatttaaataatctcatgattttgctttatttctgaaatatattttgttattaagacaggtatcaattatttgcataaaacttttccgttattaaagtaaacaaaaaggaaacttaaatttcttataacaccgttcttagaaatctataatcttatgtaatgtctcgttggttagaactcttgatcctcctgacatggactcactgtgccctagcaaatcagatattttcagaaaatatcaactaatgttacaaaattgggtgactttattttgttgcctgcctgcctcccttcttccctcttcccctctttctctctttctctcctctcgttctctcgttctttcgctcttgcataaaatgtaaaccttggaagcatttctttgtgtgatcttttccctgctttttttttgtgtgtgtgtgtttggatgggcagctggtcatgtttgtggaggccagaagacagcactgggtatcattcttaggaagtctgtctatctctttcaagatagagctttttattgtttgagaaatttaccattagatgagactgactggccggatagtccccgtatcctcctgcctcctctgtagtgttcatgggacacttatagcatgaaaggtcttgttgccttggtgtgtgtgtgtgttttgaggctatgtgcatccctgtgtattttgacatgtctcactaacttgttcacccaggttggtttaggcttgtgatttctagtgttggttgtactacttagtacttgggagacaagaggattggcacaagtttgaggccagccaggggtaaacataagcagggagactggatctcagtaaagaagagaaaaatggcccggcagtgggggcacgtgggaggcagacgcagggggatgtcttgagttggaggccagactagtctacagaaggattccaggacagccaggcaacagtgaataagcaagcaacaagaaaaagaaacagaaaaaaacagaagagaagaatgagtttgcttccaaggaaattaaagctgtttaatggcatctgatgttctcttctggtattcatgaggactgtgtactcatacacacacacacatgcatgtatgtgtatatatgcactcatacacataaaacactatctttaaataaaactattttgtgactgcacatagtactgttgttgctacccaacttgcttctctcttgtagtttatgacatagcctattcttccaacaatattaggagtattgaaaattttaatgtgaactaatgcatgtttattatgttgcatttttcactagtacaattttcatgttatttatgaaagacagcctccatgcattgctctttcagattcttccagatgatcctgataaaaaaccacaagcaaaacagttacagacccgtgcagactacctcatcaaactacttagcagagatcttgcaaaaagagaggctcagagactttgtggtgcggtaagttaaatgtgcgcgttcggaagcagtcagtccactcttccggagtctttggctacttacctagagttactgcaagaactgcactgtgcttccatttactgttcttacctagttatgactgtagagagaggccagacgtgtacagtttattattcaaagtattataacatttaatatataattttaaggatcatggactttatgaggcacttcaaaaaagactattaagatgacacatgaaaaaagacattgtaaaacttgtttttattgtatgggtaagaatatttttcttgcatgtatgtctgtaccatgtgttttgtctggtgtccacggagtctagagaggctatcagattcctggaactggagttaatatgtggttgtaagctactatgtggcttctgtccttttaagagcagcaagtgctctcagctgctgacctattgctgcaggcccaagaggaattcctcactccccaaatcttttcaaacctttctatgtttgcctgtgaacatgatgccaacaactacctgtattgtattaaaactatttctatcactttgttgttgtcactgaatctagtgacatacatatctgggagtgaaaacttgatttctattcctttctgaaggaataatgacagtggtcagtgcttttgacattgttgtatttgatataataaattatgactcctctgttgaccccaaatttggtgtagctcattaccagctgactcagaatagatgtgtttaaatttcagattcatagccatgtttttaaaacaggaaatcagtgaaattgattaaatgcaaataattacttttagggaggttcaaagaggagaaaaacgagagctaaaaagagtaaggcaatgaagtccatcaaagtgaaagaggaaataaagagtgactcgtcgcccctgccttcagagaagtctgacgaggatgacgataaagtatgtatccttgcagagcgccagctcttaatgtgaaaagggaagctgaactttagaaatggaacttttcggggttttggtggttgtaatgtagacttatttctagatcataactatgcaatatatatatatatgagacggatcagtggtccatttttcaaactcttgctaactaaatgagccatttcttttaaattttaatatgaaatttgagactggttcattttagaaagaagtaaatattacatgtatcattattaaagggattccaagttacatctttcagaacctacatgcatgcaaaaaaatttacttgaaagttagaaaaaaaatgaaggataagaaagatagtaaataatttaaagaaaaaaaaaacaagatggagagatggctcacagtaggggcacaggctgctcttctagacattttgagttcaattcctagctaccacatggtggctcacaaccattataataagatctgatgtgtaggcatacatgtaggtagaacattgtatatatagtaaataaacaaatcttgtaaggaaaagaaaaacaaaagaagctatgcagaaagaaaaagatggaagggaaggctggtattctagtgtaaaacctagaaagtggaaaagcccaaactagtttcagtggctgagttctttagaagttgttgtgggcatataattgaggggaggaattggtttgagcactcttttaataccttacaagataatattacaaagcagacattctttgtcattgtttagcaaagtagcaaggaaattttatttaaaaacctagcaacagtaaaggggggtcatgtttgagggtcaagagagatctctgagggaagttgggagaaaatgaagtatggctgttaacggagaataagtacttgcaaaataaaacatgagtggttgttgtaaagagcatcacgttgtgtttatggttgggcttttgtttctttttcccagctgaatgactccaagcctgaaagtaaagaccgatccaaaaagtctgtagtgtccgatgctcccgttcacatcactgcgagtggagagcccgttcccatagctgaagagtctgaagagctggatcagaagacattcagtattgtaagtgctgcagctcctgattacactgaagtcgagggcttaaaacaatgcagacaactcttatatttaggatttttaacttttcagttccctatccagtatttagagtatttgagtgctgatgtgcaaaggttgttcttcctaaattcagccattactgtatcaataaagtccacttaaaaaggaaagcaagttgaagtcatggagaaccaggcctagtgataaacaaggtgtgacgtttctaagtttaagaataagaaatgtgttgttacagattgctaatgaaggaaatagtataaatacacaaatggtttgtttcactgtgtgccagtgcacaccttagttgtatggctccccataagagatttctataacctgagtgctgtatgtattgaaactacgagcttgttttagttgtttgttattagtcaaatctagacctgaattagtctaaatcacttttgttactgttaaccaagtaaaacacttgcaaagatgttctcacttaagaagctgctgcgtccacagctcctgctttgtccatcttgtcttttgtatttagatttaagagtagaaatgtataaggtaagcgtgtgctcactgtctggttctgagatgtgctctcatagtctttaaatagactggttcccgctagcttctgtagccttgcatcttgtatgcccaggagcgtgtgtcctgtgttgtgtctctttgcacttatgacctccctcattcctttcctcttttctctggatgactttgtgacctagaccttaatctagcttccttgtccattctcattcattctctctctctctctctctctctctctctctctctctctcatgactttgtgacctagaccttaatctagcttccttgtccattctcattcatattctctctctccctctctccctcccttcctccttccctctccccttccatttgtctatttatctatttatttatgtatttatttatattcttttatttattgttcttggatgggtgttggcactgttgaggtttgagatgagaacattaaacgcactgcttccctgtcccatgtgcctgtctacagaatcagtggagatcagttctcaagcttgtgggacttccttaggtatcttctttagccttctcattttcatgtaactgttagagtagaacattacctactatggccaatgcatgtatgaatttctttattgttttatacattctagaggaaaaagaatggcgtaactttaagcgtatattcttgagctagacattctgagcttcagtacgtcatagctactgcatcactaagtcgtagctgcctgtgtcttgtcttcagaggctcgcactgctctggccttccccatcctaaaccatgttctttacatgtggaactttgtaccccaaacagcactcacagaagttacaatgtttagaatggtgaagtcactttcataatctctttcaggattaaaaatgcctctcagacttgtaaacagattctatttggttaactcctctcacatggttccagccatggtagcatttgttttggtttaaaattgtcaaaacaaactcttcatgaatcttcacaaacatcactttcccctaaaattctaattagatagaaggctccctgttttctgctttcaatactcttagttaccactactgtcttccttacaacttgtcttgattccataatcatctgttttgtttacttctccattttctaggcttttcatgaccctaagaaaacactatatatatatatatatatgtgtatatgtatatatatatatatatatatatatatatatatatatatatatactctgtatatgtttgttttgtcttcttttgaatttaataatttaatttattgtgtgtatgtctatgctgtgtgtgtgtcagtgcagacacccgcagcagggaatatgcacgtggaagccaggggtgagcttttgagacatagtaggtctcatacatcacccatatctggcttacaacattttcagcaatataaactgtcaaaccaatagttggcagagggcaactagaatatagctatacttgaagagggaatggaaggttccctcacatagccccagatatccccacctttgtccagtgtggtaggcttgtaaagtactttatcttgtttcttttttgagaaaatctgttatgtagctcaacctagaacttgtgaccccctgtctctgtctcacaagttttcagatttgttgctgcttattggaactcggcagtacaaagtcagaatttaccctgggtttttaatacatgtatttttgtccttttcaagtgtaaagaaagaatgagaccggtgaaagcagctttgaaacaacttgacaggcctgagaaaggcctttcagaaagagagcagctggaacacactagacagtgcttaatcaagatcggagaccatatcactgaatgcttgaaggaatattccaatcctgaacaaattaagcagtggaggaagtaagtgccagctttgaggagatgttgaagtttaagcattcctgtgtttcttggtttatttttccacttccaattttgaggtgaaaaaccatgtttttaaaattcatttatacattttaaatttgtttataatataaccagcacacaggtagtgtatgtcgtagcatggtgtactcaagaagactgatcgacatcccaggtggactttgggttatggtagaagtaagatttcattgcacagtcgtggcgttacatgcaggttaaaagtgtagaggctgtttatttctggaattgtcaatttaagattttcaggctcttggtaagtaaacctgcagaaagaggaaccattggttctgggaatcattactagaatttaatgcttttccttagtgtaaatagaattggcccttcctaagttttttgttttttggttttttttccttaaatttatgacggtctcaaaggcacgggacccctgcctgtaaagcagagactaacagtgctcttagtgagaatacggccagagtttccatcttcaagtcaaggtctaaagttgattttgccctcagtggcttccacatgtgttttaaactgttacccttggtaaaaattaggaaagtaaagacagtgtggtaaattattctttagctattttaaagagtcccattactgtttcggttttttagtgaagagatttgaaagtctggcaatgcttataaagtattgccttttggcaagaatggatcactgttgcggaagattgttgagggcgcttttaagtgtacattagttgctggttttgaaaaccttgtaattagtctttagatttttatgtttgcagagaggcatatctactttgctgtttcctagacagtaaggaacatcttgctgacatttcttagtgactaatatgtagagatgttgttttagattttgtcaacacctgcagcggggacttcactacctacattttccattccatgctcccgtcctctagcccaccccaatttccttttttattacttaaaaattgtttttttttttcctgtgtgtgcctcagtgtgcatgtatatatgtgtgaagattagagaatttctctccactatgtagctcctagctctgaactcatgttgtcagacttgctaggatatacttttacctgctgagtcatcttaatagtctccaataattaatttctttaatatagattttggttcataaagagatatgactctgtttagtgtataaaaaagggttataagaagttttataatgaggctaatttgccatttttttttcctagaaacctgtggatttttgtatctaagtttactgagtttgatgcaaggaaattacataaattatataagcatgctattaaaaaacgacaagaatctcaggtaattggtatataatattttattctttaaattatatcattaacaccatacatattctttattatttagaaataaatggagaatttagttaataaaatagaggtaatgaataaattaaatcaaataccattggagttaatcccataaaataatagtccaaagcataaatccataagcctagatcagtgggcaaggaagcaggatattatattggtctcatggataataattataaaaggagcaggatattcacatgaaaagagaaactgtttgacattaccttaagtaatcacaacaaaccagaacatgaagacgtcggctacagtgcagagaaacatgttccagctgtgatggtgtcaccaatagtataggatttgaatctagccatgggaacatttcagacaaactgcattagagggattctcaataaaagtactgaataagactcataaaaatgagccaggcgtggtggcgcatgcctttaatcccagcactcgggaggcagaggcaggtggatttctgagtttgaggccagcctggtctacagagtgagttccaggacagccagggctatacagagaaaccctgtctcgaaaaacaaaagaaaagttatcaaaggaaagactgccacagagacataatggctagctgacatgtaggctttagcctggcttctagggacataggagagatctgattggaacacgattgagctgagagtgtattgggtatgatttcacattggtgggtggctgatgagcatatgagaccggcacatggttttcatcatcttctttgtcaagtctaaaattaattcaaagtcagtttttaaaaacatggaggaaattgttttgtttaaagatacttgtatattttatatttatatatgcttggtatttgaagatcttaattcaacatgaggattttcttaagccgctccccctccaccccccattctatcagagtagtttaggctacttagattacttaaacatgtctaatacttgtgcattttattttagcaaaacagtgaccagaatagcaatgttgctaccactcatgtgattaggaatccaggtaaacttttaagaagttttttctttcttttcttttcctttcatttctttttccccgatggtgtgcgttggcttcatttttgtagatttattttttgtgtgcaggtgggtgtgcatgtggtcacatgtgcctgtgtgagagcacaggtaagggtgtgcgtgtggtcacatgtgcctgtgtgagaacacagaggctagcgagggttttgaacacccttcatatgcttttctacatggtacttagagcttgaggcccataggtttgcagtctgcattctatctagcaagtgttagaaatcctctgttctttgcttcctcggagcttggtcaggcttgttatgtgggtgatgggatctgagctcgggaactcaggaatgcgcagtaaacacatttattctgtaagatatgtagctccctagcccctgtttcgtttcttaaatcaatttttaaaaagttattcttgttcaaagtactgagaaacgactattaacagaaagagaatcaggtcattttcttccctctaacctgtctgtactttaggggtgtgtgcgtatgcatgcgcacataaatagaacctgagtcttgtttgtttgtttgcatgtggtttggcttatccctgggagagagaggctaaaagttctcagtcaagaagtcattagtttgcccatagttctcttttgaggactaggactctgtaaaatttccccttccatattaatatgtccattgataacaccattgctctgatcttagtgtggcagtaatttctaggagagacagacttcctagtcctttggctttcccacctccgtctctgcagtgttctctcagtcacagacacaggagctgtgacatggatctgtccttggagctgagcttttcagggtccagttggagttttctgtgatggtctctacttgctataaagaagctttgatgagggatggtaccgacacttacctgcaaaaccctttaaatgcttttgtgtttgagaattgattttgtttgggcaggagttactgttattatttgtattaatgaagtttcacttatttatctaatagatatggaaaggttaaaagagaatacaaatcatgatgacagtagcagggacagctattcttctgacagacacttatctcagtaccatgatcatcacaaggaccgccatcagggagattcttataaaaagagtgactctcggaagagaccctactcctcatttagcaatggcaaagaccaccgcgagtgggatcactacaggcaagacagcaggtgagctggagagcgagcggcttaaacatttaccttctctcatccttctcttgttaagtacatttcctacatttgggatagacctatgccattttcatgagaatagatcaagcattttttatatatcaacaaaaaaagatagtacttttcatgttaatgtttataaatttttctccaaaatggttttgaagtagtaaattgacatcagaatatgcaatgagttttaaaagttttgtcattttaaatagtgcagcttgttggtggaagtacaggctttttatggagagaattctgcattggatactgaaattcttaggagggagaacctatattaagtcaaaatatattttattcctttattgcttaaagagtttccttgctaatttgaaaccattgctacaattaaactcagacaattgataagtaaaagtcagaaataaatggaggacctgcaggtgctgctctgagttgctcaaccgagtggagaagccccatggggctctgtggttcagtggtgctcacagccatcgctgtataagcactcattatagaaaggctttttgttagagatggtgtaaacagaaaagctatatctgtaactacatataccagtaatttcacgagaaagtgtttgtgacaagaatctttgtctaatcggagcattttatttgaaaaggcaaatatgtagagacttcttgttcagctgccagattgcatgtgtgttgactcattacataactagttgatgaaaaaatgtttgacatcgccaactactgagaagtttctttttatgagttttcagactacattctggcattctaggttttcctccaagaggtttgtaaagggcttcagtttccaggggaaagtgcatagctggggttatttctgtgcatctcacactgagctccactgatccacgagatttcttagtgaggtacaaatacgttcagggagctttgtgtgcctctatccagacttgtgagccagaatttgtatagagattcctagtgatttcagcagctgtgtgaggtggctctgtgttgcacagagaagtggttctcagctactttcaggaaactgtgagcttctgcatgattaaaatacatgttaaagtagctatacttttctgtatgtatggttttatttgggaattttaacttactaatttgactaagagtctaaatttctctttcattaggtactatagtgaccgagagaaacacagaaaactggatgaccacaggagtcgagagcacaggccaagtttggaaggaggcttaaaggacaggtgtcactctgaccaccgatctcactcggaccatcgaatgcactcagaccatcgctcaagctccgagcacacacatcataaatcctccagggattatcggtatctctcagattggcagttggaccaccgagctgccagcagtggccctaggtcacctttagatcagaggtctccatatggctccaggtccccatttgaacattcagctgaacacagaagtacgcctgaacacacctggagtagtcggaagacatgacagaagctcatgagtttgtcttccgggactttgttttagccatagatcataaaccaacacagtaattgccttacatgacttgaaagattcaaacagctcttctgtcagtagcagtattgttacttctctccaggacgcaaggtctattatcccaacagaagagaaaatatttttatatttaaggattatgctgcactgtactgcgatactgcagtaccttttttttctttttttaaagaaatggaaaatgtttactatgccagggacctcagcactgccctcccgtgtaggctgtataaaactgtttttatgtcagtgattttagactgactccatttaaattatgtttgtatatgaactttactctgacctgtgatcatgtttcaggaaggaataaaagagaggtcttttcttaataaagaaaaatcactcaaggactttgttcactttccaaagctacttgtttacattgtacactgcgaccaccttgccgctcccatcacaagcttgaatatttaaatcctgtacttaagtttgtaatatagccgggaatttccctgtctgtgattattattatgcctttttacagaagaagatggctgtaaattattgtaaatggattaaatgagctgccctgccctgcccttctcaggcttcttttgactgttcctttccctaccaactcaggccttcttattaaaaaaaaaatcagtgtaataacactttttaatgatttgtcttgatggaatcattgtttagaatgtaaaaatggggaaaggggccacttatttcttttagtcctttttatattgagtatttttattagatacatgttttgcccctcctttttaaagtcaatattgtgtttgtagttttacagaagcagtggcgagggttacatgtgagacaaactcggtgctctgggagagtccccagtgcattgggttgaaagggtggtaggtgtatgaacacttaaaatccaaatggccaaacgttcttgtaaatgcattgcttttccctttcatgtgggcaataatgtcaaacgtgctatgcagccaggttaacatttgaggtaaacttgattggctttaatataaaaactgttacagtacacactgattgtatataaaaaccttatatatgacaaattaaattttaagaaaaaggatatgtgggctcctgtagttttctgctgcattcttgtttccacgagcatttaatctttgctttaagtaacagctgccagaaagaaaggtattttggtcagcaactgagaactgttgatatgtaatcctaaaactgccta

SEQ ID NO: 48 - DNA, 6596 bp, Mus musculus
cccgcaggtgacacagagagagccccaggaaacccgtgaatgttgaagaaaattcatctttgaaattttaatattcgaggaaatctgcattcatactcatcttttattaatctgaggggatttttgttttatttaaaacttcttgatatttacaatgaatggacacagtgatgaagaaagtgttagaaatggcagcggagaatcaagtcagtcaggtgatgattgtgggtcagcatcaggctctggatctggctcgagttctggcagcagcagtgacggaagcagcagccaatccgggagcagcgactctgattctggctctgactcaggaagtcaatcagagtctgaatcagacacatcccgagagaacaaggttcaagcaaaaccaccaaaagtcgacggagccgagttttggaaatctagccccagtattctggctgtccagagatctgcaatgcttaggaagcagccacagcaggcccagcagcagcgcccagcttcatctaatagtggatccgaagaagactcgtccagcagtgaagactccgacgactcgtccagcggtgccaagaggaagaagcacaatgatgaagactggcagatgtctgggtccggatctccatctcagtctggttcagactcagaatctgaagaagagcgagataaaagcagctgcgacgggacagagtccgactacgagccgaaaaacaaagtcagaagccgaaagcctcagaatagatctaagtcaaaaaatgggaaaaaaattcttggacaaaaaaagagacagattgattcatctgaggatgaagatgatgaagattatgataatgataaacgaagctctcgccgccaagccaccgtcaatgtgagctacaaggaggatgaagaaatgaaaactgactccgatgacctgctggaggtctgcggcgaggacgtccctcagcctgaggacgaggagtttgagacaatagagagggttatggattgcagagtggggcggaaaggagctactggtgctactacaaccatttatgctgtcgaagcagatggtgacccaaatgcaggatttgaaagaaacaaagagccaggagacatacagtatttaattaagtggaaaggatggtctcacatccacaacacatgggagacagaagagaccctgaagcagcagaacgttagagggatgaaaaaattggataattataagaaaaaagatcaagagacgaaacgatggctgaaaaatgcttctccagaagatgtggaatattataattgccagcaagagcttacagatgatctacacaaacagtatcagatagtggagcgcataattgctcattccaatcaaaaatcagcagctggtcttcctgattattattgcaaatggcaggggcttccatactcagagtgcagctgggaggatggagctctcatttccaaaaagtttcagacatgcatcgatgaatattttagcaggaatcagtcaaaaacgacaccttttaaagattgcaaagtgttgaaacaaagaccaagatttgtagctctgaagaaacaaccatcctatattggaggacatgagggcttagaactgagagactatcagctgaatggtttaaactggctcgctcactcttggtgcaaaggaaatagttgcatacttgctgatgaaatgggccttgggaaaacaatacagacgatctcatttttgaactatttgttccatgaacatcagttatatgggccttttctactagttgtcccgctctccacactgacttcctggcagagggagattcagacgtgggcgtctcagatgaatgctgtggtttacttaggcgacattaacagcagaaacatgataagaactcatgaatggatgcatccccagaccaaacggttaaaatttaatatacttttaacaacgtatgaaattttattgaaggataaggcattccttggtggtctgaattgggcattcataggtgttgatgaagcgcatcgattaaagaatgatgattcccttctgtacaaaactttaatcgactttaaatctaaccatcgccttctgatcactggaacccctctacagaactccctgaaggagctctggtcactgctgcacttcattatgccggagaagttttcttcatgggaagattttgaagaagaacatggcaaaggcagagaatatggttatgcaagcctccacaaggagcttgagccatttctgttacgcagagttaagaaagatgtggaaaaatctcttcctgccaaggtggagcagattttaagaatggagatgagtgctttacagaagcaatattacaagtggattttaactaggaattacaaagccctcagcaaaggttccaagggcagtacctcaggctttttgaacattatgatggagctaaagaaatgttgtaaccattgctacctcattaaaccaccagataataatgaattctataataaacaggaggccttacaacacttaatccgtagtagcggaaaactcatccttctcgacaagctgttgattcgcctaagagaaagaggcaaccgagtgctcattttctctcagatggtgcggatgttagacatactcgcagagtatttgaagtaccgccagttcccctttcaaagattagatggatcgataaaaggggagctgaggaagcaggctttggatcactttaatgccgagggctcagaggatttctgctttttgctttctacccgagctgggggtttaggcattaacctagcctctgctgacaccgttgttatattcgattctgattggaatccacaaaatgatcttcaggctcaggcaagagctcaccgaattggacagaagaaacaggtgaatatatatcgcttggttacaaagggatcagttgaagaagatattcttgaaagggccaaaaagaaaatggttttggatcatcttgttattcaaagaatggataccactgggaagacagtgctgcacacaggctcggctccgtcaagttccacccccttcaataaagaggagttatccgccattttaaaattcggtgctgaggagctctttaaggagcctgaaggagaggagcaggagccacaggaaatggatatcgatgaaatcctgaagagagccgagactcacgagaacgagccaggcccactgagtgtgggggatgagctgctttctcagtttaaggttgccaatttttcaaatatggatgaagatgacattgaattggaacctgaaagaaattcaaagaactgggaggagatcattccagaagagcaaagacggcgactagaagaggaggagagacaaaaggaactggaggaaatttatatgctcccgagaatgagaaactgtgcaaagcagataagtttcaatggaagtgaagggaggcggagtagaagcaggagatattctggatctgatagtgattcaatctcggaaaggaaacggccgaagaaacgtgggcgaccccgcactatccctcgggagaatattaaaggatttagtgatgcggagattcggcggtttatcaagagctataagaaatttggtggccccctggagaggttagatgcaattgctcgagatgctgaattggttgataagtcagaaacagatctcagaagactaggagaactggtgcataatggttgtgttaaagctttaaaagacagttcttcaggaacagagcgagcaggtggcagacttggaaaagtgaaggggccaacattccgcatctctggagtccaagtgaatgccaagctggtcattgcccatgaggatgagctgatccctctgcataagtccatcccttcggacccggaggagaggaagcagtatacaatcccctgccatacaaaggctgcgcactttgatatagactggggcaaagaagatgattctaatttgttaattggtatctatgagtatggctatggaagctgggaaatgattaaaatggatccagacctcagtttaacacacaagattcttccagatgatcctgataaaaaaccacaagcaaaacagttacagacccgtgcagactacctcatcaaactacttagcagagatcttgcaaaaagagaggctcagagactttgtggtgcgggaggttcaaagaggagaaaaacgagagctaaaaagagtaaggcaatgaagtccatcaaagtgaaagaggaaataaagagtgactcgtcgcccctgccttcagagaagtctgacgaggatgacgataaactgaatgactccaagcctgaaagtaaagaccgatccaaaaagtctgtagtgtccgatgctcccgttcacatcactgcgagtggagagcccgttcccatagctgaagagtctgaagagctggatcagaagacattcagtatttgtaaagaaagaatgagaccggtgaaagcagctttgaaacaacttgacaggcctgagaaaggcctttcagaaagagagcagctggaacacactagacagtgcttaatcaagatcggagaccatatcactgaatgcttgaaggaatattccaatcctgaacaaattaagcagtggaggaaaaacctgtggatttttgtatctaagtttactgagtttgatgcaaggaaattacataaattatataagcatgctattaaaaaacgacaagaatctcagcaaaacagtgaccagaatagcaatgttgctaccactcatgtgattaggaatccagatatggaaaggttaaaagagaatacaaatcatgatgacagtagcagggacagctattcttctgacagacacttatctcagtaccatgatcatcacaaggaccgccatcagggagattcttataaaaagagtgactctcggaagagaccctactcctcatttagcaatggcaaagaccaccgcgagtgggatcactacaggcaagacagcaggtactatagtgaccgagagaaacacagaaaactggatgaccacaggagtcgagagcacaggccaagtttggaaggaggcttaaaggacaggtgtcactctgaccaccgatctcactcggaccatcgaatgcactcagaccatcgctcaagctccgagcacacacatcataaatcctccagggattatcggtatctctcagattggcagttggaccaccgagctgccagcagtggccctaggtcacctttagatcagaggtctccatatggctccaggtccccatttgaacattcagctgaacacagaagtacgcctgaacacacctggagtagtcggaagacatgacagaagctcatgagtttgtcttccgggactttgttttagccatagatcataaaccaacacagtaattgccttacatgacttgaaagattcaaacagctcttctgtcagtagcagtattgttacttctctccaggacgcaaggtctattatcccaacagaagagaaaatatttttatatttaaggattatgctgcactgtactgcgatactgcagtaccttttttttctttttttaaagaaatggaaaatgtttactatgccagggacctcagcactgccctcccgtgtaggctgtataaaactgtttttatgtcagtgattttagactgactccatttaaattatgtttgtatatgaactttactctgacctgtgatcatgtttcaggaaggaataaaagagaggtcttttcttaataaagaaaaatcactcaaggactttgttcactttccaaagctacttgtttacattgtacactgcgaccaccttgccgctcccatcacaagcttgaatatttaaatcctgtacttaagtttgtaatatagccgggaatttccctgtctgtgattattattatgcctttttacagaagaagatggctgtaaattattgtaaatggattaaatgagctgccctgccctgcccttctcaggcttcttttgactgttcctttccctaccaactcaggccttcttattaaaaaaaaaatcagtgtaataacactttttaatgatttgtcttgatggaatcattgtttagaatgtaaaaatggggaaaggggccacttatttcttttagtcctttttatattgagtatttttattagatacatgttttgcccctcctttttaaagtcaatattgtgtttgtagttttacagaagcagtggcgagggttacatgtgagacaaactcggtgctctgggagagtccccagtgcattgggttgaaagggtggtaggtgtatgaacacttaaaatccaaatggccaaacgttcttgtaaatgcattgcttttccctttcatgtgggcaataatgtcaaacgtgctatgcagccaggttaacatttgaggtaaacttgattggctttaatataaaaactgttacagtacacactgattgtatataaaaaccttatatatgacaaattaaattttaagaaaaaggatatgtgggctcctgtagttttctgctgcattcttgtttccacgagcatttaatctttgctttaagtaacagctgccagaaagaaaggtattttggtcagcaactgagaactgttgatatgtaatcctaaaactgccta

SEQ ID NO: 49 - protein, 1697 aa, Mus musculus
MNGHSDEESVRNGSGESSQSGDDCGSASGSGSGSSSGSSSDGSSSQSGSSDSDSGSDSGSQSESESDTSRENKVQAKPPKVDGAEFWKSSPSILAVQRSAMLRKQPQQAQQQRPASSNSGSEEDSSSSEDSDDSSSGAKRKKHNDEDWQMSGSGSPSQSGSDSESEEERDKSSCDGTESDYEPKNKVRSRKPQNRSKSKNGKKILGQKKRQIDSSEDEDDEDYDNDKRSSRRQATVNVSYKEDEEMKTDSDDLLEVCGEDVPQPEDEEFETIERVMDCRVGRKGATGATTTIYAVEADGDPNAGFERNKEPGDIQYLIKWKGWSHIHNTWETEETLKQQNVRGMKKLDNYKKKDQETKRWLKNDEDVEYYNCQQELTDDLHKQYQIVERIIAHSNQKSAAGLPDYYCKWQGLPYSECSWEDGALISKKFQTCIDEYFSRNQSKTTPFKDCKVLKQRPRFVKKQPSYIGGHEGLELRDYQLNQWLAHSWCKGNSCILADEMGLGKTIQTISFLNYLFHEHQLYGPFLLVVPLSTLTSWQREIQTWASQMNAVVYLGDINSRNMIRTHEWMHPQTKRLKFNILLTTYEILLKDKAFLGQWAFIGVDEAHRLKNDDSLLYKTLIDFKSNHRLLITGTPLQNSLKELWSLLHFIMPEKFSSWEDFEEEHGKGREYGYASLHKELEPFLLRRVKKDVEKSLPAKVEQILRMEMSALQKQYYKWILTRNYKALSKGSKGSTSGFLNIMMELKKCCNHCYLIKPPDNNEFYNKQEALQHLIRSSGKLILLDKLLIRLRERGNRVLIFSQMVRMLDILAEYLKYRQFPFQRLDGSIKGELRKQALDHFNAEGSEDFCFLLSTRAGGLGINLASADTVVIFDSDWNPQNDLQAQARAHRIGQKKQVNIYRLVTKGSVEEDIRAKKKMVLDHLVIQRMDTTGKTVLHTGSAPSSSTPFNKEELSAILKFGAEELFKEPEGEEQEPQEMDIDEILKRAETHENEPGPLSVGDELLSQFKVANFSNMDEDDIELEPERNSKNWEEIIPEEQRRRLEEEERQKELEEIYMLPRMRNCAKQISFNGSEGRRSRSRRYSGSDSDSISKRPKKRGRPRTIPRENIKGFSDAEIRRFIKSYKKFGGPLERLDAIARDAELVDKSETDLRRLGELVHNGCVKALKDSSSGTERAGGRLGKVKGPTFRISGVQVNAKLVIAHEDELIPLHKSIPSDPEERKQYTIPCHTKAAHFDIDWGKEDDSNLLIGIYEYGYGSWEMIKMDPDLSLTHKILPDDPDKKPQAKQLQTRADYLIKLLSRDLAKREAQRLCGAGGSKRRKTRAKKSKAMKSIKVKEEIKSDSSPLPSEKSDEDDDKLNDSKPESKDRSKKSVVSDAPVHITASGEPVPIAEESEELDQKTFSICKERMRPVKAALKQLDRPEKGLSEQLEHTRQCLIKIGDHITECLKEYSNPEQIKQWRKNLWIFVSKFTEFDARKLHKLYKHAIKKRQESQQNSDQNSNVATTHVIRNPDMERLKENTNHDDSSRDSYSSDRHLSQYHDHHKDRHQGDSYKKSDSRKRPYSSFSNGKDHREWDHYRQDSRYYSDREKHRKLDDHRSREHRPSLEGGLKDRCHSDHRSHSDHRMHSDHRSSSEHTHHKSSRDYRYLSDWQLDHRAASSGPRSPLDQRSPYGSRSPFEHSAEHRSTPEHTWSSRKT

SEQ ID NO: 50 - DNA, 71585 bp, Homo sapiens
aggtgaatcaaaggagagtcccagaaaacctgtgactgttgaagaaaattcatctgtgaatttttatattcaaggagtcagtatttatattcatcttttaaactgggaagatttatattttactttaaaacttcttgataataatttacaatgaatggacacagtgatgaagaaagtgttagaaacagtagtggagaatcaaggtaagtaagcactttgttatcaattgtttactatgaagagagttgaaaacttgacttttttctttattgttattgttgttatttagttttcctcataggtagcagagttttcaggttttcctcttagctatccaaatactaaaaaaattctgatatacgaaccttttttcataatacaggttttaattatatttttcattcagatacacagtagatcttaaatatagaaagtttttgtttacttaaatctatttggaagtttatatttgagctaataattaagctggagcatgtataatagatttaaattgttttgactgttagtgaaatttctagatgaaggcaataaaaattttttcactcatctttttctggcattttgtcttctatacctgtactgtccagtgtggtaaccactagccacatgtggctatttgaactcaattacaaaatattcagaatttacttagtcatactagatatatttcaagtgctgaataatcacatgtggctagtggctaccatattggacagcacatagaaaacattctatcactggagaaagttttagacagtgctgagccagacatttgttgaaatattactgtggcccttttttattttcagattggagttttaattatctgtgaaggagttaagagttcttgcttgggtcaagtgtttgcaaagaagattctttaaattctgtagctctcaaattttgagttatctgcacattagtttacaatccatgtagttatatgcattatcatatatagaaattaggaatgtgggcactggagtcaaactgtttgcttaccctatttctacctcttattagttgtgtgaattagggcaaattacttaatctctgaggctctgatttttgccccataaagaggggattaaactattgtttatcttatttaaagttcacggctgggcttgttggatcctgtttgtaatcccagcactttgagaggctgaggaaggaggatcacttgaactcaaaagttggagaccagtttaggcagcatagtgagactttgtctctaatttataaaaaataaaatttaaaaaaaatttgaggattgagatgcttcatgtaaagggcttaaaatattttctgagataatgagcactgaatatttgcttattgtaaccagcatgttttgtgtaacacaggatactatataaaaaaaacattaattacagtgatggagacatgggggtggacaagaaacaggaaagttttggcaattaggaagattaagaaaaaatgttagatagaaaactaaatagtggtatttgtatttgatctgaaacttggacttttctttttctttttttttttttgagacagagtcttgctctgtcgcccaggctggagtgcagtggtgtgatcccggctcactgcaacctccacctcccaggctcaagtgtttctcctacctcagcctccggagtagctgggattacaggcgctagccaccactcccagctaatttttgtattttttttgtagagatggggtttcgccacattggccaggctggtctcgaactcctggcctcaagtgatccacctgcctcgagctcccaaagtgctgagattataggcatgagccaccacgccaggcctgacacttggaattttctgaccttgctagttatactttagtttatcagctttcatacatactgtttggataagcaagaacatcatagagaataaaataaggaacagttatggaaagcagcattattacttgaacaagtattggtctaggagttatacaacctgagttgatgctatctctgcattaattaaaactcatatgattgcctcaactctaaggattgaactgatattgaagtttcattttaattaattacaaagtgcatcgtaaagtttcaaacagtaaagttttactagaatcaccagagttgaggtttaattaaaagacttttgaatctgagctttgattcaaatctctataggtatgttgactactgactatagttaagtaaatagaagagtcatattgtccacccacaattttttttttcttttcttttcttttgagacagggcctcactctgtcacccaggctggagtacagttgtgtagtctcagctcactgcagcctctgcctccacctcctgggctcaaacgattctcccacctcagcatcctgaaaggcgtgcatgccaccacactcagctaattttaaaattttttgtagagatgaggtctcaccatattgcctcagctggtcttgaactcatgggctcaagcagtcctcccaccttggcctcccaaagtgttgggattacaggtgtgagctgccacacccggcctcacattttcttattcatagttggaatggaatggttagtaggtagaaatacctagaggaaacaaaggaaccaaactattcataaaataggagataagactcgagagtaaatcttctagttggatatgcagacagatcatgtgctggtatattctgactacttacctgttccaatattttatatatttttctgccatatctaaagcgaggaggagtaataagtccaatttgatactacaggtgaaaaaaaattaaaccttgtggccgggtgcggtggcttacgcctgtaatcccagcactttgggaggccgagcaggcagatcacctgaggttgggagttcgagaccaccttgaccaacatggagaaatcctgtctctaccaaaaatacaaaatgagctgggtgtggtggcctgtaatcccagctgctcgcgaggctgaggcaggagaattgcttgaacccaggaggcagacggaggttgcagtgagccggagattgcgcgattgcactccagcctgggaaacaagtgaaactccgtctcaaaaaaaaaaaaaattaaaccttgcgaaatcaaatttaaggaatcttttacaatgcatactcatcttaaataattgcaaagcatatttctttaattattcggagttgttaattctgctatacaggttttgtgtgcttctgaaaagtgtggttatcaagttatctagtttttacaactgccttggagtttatcaggagagagaccttcttttttgccttcattttctttcttaccgctgctatactatgctctactgtcattaacactcaattcccactcccttccccagaagcttttgtcataagacattacaaagaagggagattgtgcctagttaaaagactgaggaggtgaactttagaggtagagggattttcttgcaaaaaaaactaaagtttctataactatgaatattaatatagagtaattttttttcttttttttgagccagagtcttgctctgtcgcccaggctgcagtgcagcggtatgacctcggctcactgcatcctccgcctaccgagttcaagcaattttcctgcctcagcctcccgagtagctgggactacaggcatgcaccactgcatccagctaatttttgtatttttagcagagacggtgtttcgtcatgttggccaggctggtctcgaactcctgacctcaggtgatctgcccgccttggcctcccaaagcactggggattacaggcatgagccaccgtgcctggcccctaatataattagattagaaatatactttgtttctaaagttgatattcattgtaagtagctttttaaagtaaattttggttttttagtggctagaattctataatgtatttttgcttcaaaatttcctttttcttttgtgaaagtttattaaacggaatagaattaagaaagaattcatttggcatttgcaggttacagttagctttctactgaaaaaaaaaatttttaactattctttctgtctggagatctctctataactattcactgaaaggaagaagaatacacaggaaaaatatgtctcttttgctatgctattgctgacagtcttgaaatttagttactaagaaatgtgggccaggatgcacctgtataacagttacagctcaacacaaagttttatgtaactgaagttaagctttttaaagataatgctggaagatttcaaagcatcaatttgcagctgtgtggatttgtggtggtatttgcaagcaaatttttcaaatcctggtagacttttttttagtgtgtgtgtggtttgtttttttttaattgagatggagtctcactgttgcccaggctggagtgcagtagcacgatcttggctcactgcagcctccgtctcctgtgttctggcagttttctgcctctgcctcctgagtagctgggattataggtgcccgccaccatgccccgctaatttttgtatttttagtaaagatgggatttcaccatgttggccaggctggtggtcttgaactcctgaccttgtgatccacccacctcggcctcccaaagtgctgggattacaggcatgagccactgcgcctggctgactttttttagttttaaataagttatcttgagtgatgatttacttcaggaatggctatatggttaaagatcagaatggtgtatgagttacctttcaaagattacttttctgtatgtagtcataatgtgtgggcaaacattaatgtgatgttaccccttttactctgcttaagtagctgcttgtttaagatcttgatgactgattggttatatatggtgcagttttgtgttttaaaatgagtattactttatgatgaatggagaaaatgtttaacctttttttaaaatgggaaatatttaaaactacagaaatagaaaagttgcaccagttgtggtccgtggaccagcggtgttggcatcatttgggagcttattataactgtagaaccttgtgcctcgccccagacgtactgaatcagaatcttcattttaacaagattctaagtgattcttatgtattaagttcatatacatttatatgaagctattcatctggagtcatagcatcttgccactttgttattgatgttgttatacatggttttcattctctgcgaacctccaattaattgtgtcttgagcaggactagcaagaggctaggtaagtttcgtttctccggaagcagtaacaatggcaactgatgattgttgagctcttgctgtgccttaacctagcatgatgcacatagggcattgtgcattacttgaattgtcacagttcatcctcacaaaacttctgtgatgtatacattgttatgattcccactttccagatggggaaacaagatttatagccattttatttatttttttattcttttttaaaaaactattacctaaactctatacttggatttcattgatttttccattaactccctcttttctgttgtaggattaaatccagagtgccacattgcatttagttgtcacgtctccccagtctcctttcatctgtgagagtttctaagtctttccttagttttcatggtctaaaccatcttgagaaatactggccaggtatcctgtagaatgtctttgaaatctagatttgtctttttttttttttttttgagacggcgtcttgctctgttgcccaggctggagtgcaatggcacgatctcacctcactgcaacctccgcctcctgggttcaaacgattctcctgccacagcctcccgagtgactgggactacaggtgtgcaccaccatgcctggctaatttttgtatttttagtagagacagggtttctctgtgttggtcaggctgatcttgaactcttgacctcaggtaatccacccaccttggcctcccagagtgttgggattacaggtgtgtgagccaccacacctggccttgtctattgttcttaggataaactagggttattggtttttagaaagaataccacaaagataaagtgtgctagtcacatcatatgggaaacatgttatcctcatgacattactggtggtgttaacctctcacttggtcaaggtagtatttgcaagtttctctactgtaaagttactgtttttccctttccataatatattctttggaagcaagtcattttgtctagcctactttcaagagggttgggataggaattaaattccatctcctggtggggggagtatttacatatattaaatggaatttctgtaaggaaatttctaaatcgtttatatatgtatggatttatgtatgtgctttgagttgtaatccagcttagtggattacaactctataaaatatatatttgtatatatttatgtataataggtattttatgtatctattgtataatagttgacttttttgttacttaaattgatctagccttggctcttggaagcttttttaggttggctcgtatgtttcttttacacactgccttacttttaccctagaatcagccactctccaaggagccttggttccatttttttggagaatggcattagaaaccaagatttgggtactgggtgtgcttgttgatattcaagtgtcactgcttttatttcctctcagtgaacaaagtagacagagctaggtaatatatgtagatatattatgtatacctacgtatctatagtcatttctgtatccttacgtctgtatacatattatctcatacataaacgtgagttcataccgatggctccaactctaatcctgtgctatagggttcattctaacctttctttcttattgctttgtaacttccttactcaacattgagaaacctggctctgaccatccaccatttatctgcttatatattcactcataatatacatgtaaagcagttttagaatttttaggatatactttatcaagagaaactaatttcgcaactaaaatacggtgtttacatacagtacactttaatatttagcctttaagtttctagtcaaaacactgttttctgatgttggtcaagttcatttttctctcacccctttgagtgtaattatgtgataaatttataataaaattagattcatttgtcacaatctgcattccatcctgtgatcatcatcatactggttgatttttaaaatttgcatatattaatgcttattcaatgatgcacagttctttgggttttgacaagtgcatagaatcattttttctgtactccagtaatgtacagaacaattccttcatcttaaaaggtcccagatctactgagccagaatttccattttaataagattcccaggagaattgtattcatgttaaattcatatgcatgtatatgaagctattcacctgtagtcattcagcatcttgccatgttgtaaagttatacattaacttcaagaaagattattataatctaggggtgataatggaatagccagtttaaatatgcaattgagtatattcaaatttgtggggccaaatgggcatgcaagtgaggtaaaaagaaaatggagggtagattactagagtcatttaatgagctatttggaaagttttcatagcatgctttaacttttgtaattttcataatgatgagaaatgtagtttgaaaagaaagaacaaatgatatatattcagaagggtgttggagaggaagtttttttttttgtttttttttttttttgaagagtcttgctatgttgccaggctggagtgctgtggtgtgatcttggctcactgcatcctccaacaagtgattctcctgcctcagcctctcaagtagctgtgattacaggcacgcgtcaccatgcccagctaatttttgtatttttcgtacagacggggtttcaccatgttggccaggatagtctcgatctcctgacctcgtgatccgcccaccttggcctccctaagtgctgggattacaggtgtgagctcccgcgcccggctcaggaagatgtttatggaagtcatagtcccccattaaagaagtatgcaagtcccctaataaggagaatgtatttgacatctagctttgcagttctttacctgaggtttattcattgttaaaagtttttggccaggcgcggtggctcacatctgtaatcccagcacttttgggaggccgagtcgggtggatcacaaggtcaggagatcgagaccatcctggctaatatggtgaaaaccccgtctctactaaaaatacaaaaaaattagctgggcgtgttggcgggcacctgtggtcccagctactcgggaggctgaggcgggagaatggcatgaacccaggaggcagagcttgcagtgagccgagatcgtgccacggcactccagcctgggcgacagagcgagactccatctcaaaaaaaaaaaaaagtttttctgtgacttagttccaggtgaaggaaggaaaaaaaaggaagcatagcagaaaaaacactgccaatggggactgtattccccacgtgaatgggttggaaccactagttttagggagagattccaggaatcttgtaccagaatcaacttgtatatatgactgagaaaattagtgtttatgattgaaaatatattatgtatcactatggtatgaggtgactgttgagtcagaagtcaactttaaatgttaaattgcactcagaagtttctttggtgtagatagattgagatctaagttattgagattaaaatatgtagagacaaagctggagatgtgcaaagttctattcaaacagtactgacttctggaattcagtgtctacagtatctctcagaactgaggcataaggcacaagaatagcggggtactcttttcttaatgagaatgactccaaatagctatttctcagttccactgttgttgctttcagaaatacaagtgtttgttttcagatagttatttagatgattgagcaactactacgtggtagatatcatgggattctaaaatttgagttcctttaaagcttataatcaagaaagagataaaagtcttcaaaaatacatgtatatgtcaggtggatactgtaaatgcagagagatactaaaatctgtggccaatcaaatgtaggagtgaagtttgatcataaggacaagtatcaagcccaatattaattaagaggttgttttttttttttgtttctttgtttttggagggatgggcttaaaaccatgataatcttaaatttcacgtatgttaaaaatgtcctggtgatgtgactttggtggtaaggcatttagacaggcttaagcaaaaagcagagtgatttaatttttatactaaggaaaagtatgttagtaaaagctaatgagtcctaggatcaaaagtttttatgtcaaggcatggggccattggagaagagtgaagtaacattctaaattcctacaagcctaaaacaaggagtctttttgtttttatgcttgagattgattactattacttctgtaatactgttttcacagttctaaatgattcagtcctcagttacattagtaaaaggcagaggttggatatgaaaggaaaatttataataaaagaatcagaattagttgtataaggggtaccaaaatttctaatcatcttttatctattccagttttagaatgtattttatagtgaaggattaacccattgtccaccctagcatctggtacatactacattgtttatttcacattttttaaccaaatgactcacaataaaggcagttttttcttaggtgcagtacacacccataggtatatgcagacagatgaaatgccacataacaaataattttgtttaaaattacatattgctggtaacttcatttttttgtggcagtattcattaaagtaatttaaaagcatataaatatttttaaaccttttttttttttttttttttttttgagacggagtttcactcttgttgcccagactggagtgcaatgttgcaatctcggctcaccacaacctctgcctcccgggttcaagcgattctcttgcctcagcctcccgagttgctgggactacaggcatgcactaccacacctggctaattttgtatttttagtagaaacaggatttctccatggtggtcaggctggtctcgaactcctgaactcaggtggtccacctgccttggcctcccaaagtgctgggattacaggcgtgggccaccacacctgccaaaaccttttttaaaaagcaaactaaatatcaataatctctttaaaattgaacttttatttatttattttttaagatggagttttgctcttgttgcctaggctggagtgcagtggtacagtcttggctcactggaacttccacctcctgggttcaagcgattctcgtgcctcagcctcccaagtagctgggattacaggcatgtgccaccatgcctggctaattttttgtatttagttaggacggggtttcaccatgttgattggactgctcttgaactcctgacctcaggtgatcgacccacctcagcctcctaaagtgctgggattttgggtgtgagccaccgcgcccagccaaaattgaacttttaaatgtaggcattatttgcgttaacttaaatattattatgaataatttgaagtttatattaaagtactgacagtagtaaaatgagccccatgtacacaccatatagcttcaacatattttatttcatagcccaatctaatttaatctcttaactcctgttaccctctcccacctcacttgattttttggaaacataatttctctatgtgttagacttctgcctgaaaaaagtcattaaggtttgccttgttgttgtaactataaattagagaattagagattttcattcatgtcattgatactataataaattttagatgtatgttaggaaactatttttcagtgacttttcagtgtatatatccatagcccttatttctcatctgctcattctctgcttactagaaaatatttacttttgagtttatcctgggttcaacacaactaagtaatcatctttgaaattagtcatgttaaaagttactcttcctagtatctctccacttttaacagttttaaatttcttcagttagaaactttaaggagatagaatcatattgtactttaagcagagtttataatacagttttgtcttggattgatagtttagaatgctgaaaggaactgttgttttgctggtcagtgcttaacaaagcagtggaactacctggttttcagagttgtacaaatgagaagatgttttccaggttttctgaaaccttttatagtttttatttgtactatttcatcaaactttgtatttatgtgtgtgtatacttcatcatgatgtaaaatgtattatataggtcatggtccaaaaagtttgaaagccgttgcttgactttggccactaattgtttttttgttgttgttgttaatgtttagcattcagtcattacctactactttccagattctttctacagtcatgctaaagtggacagtggtctataaaataactaaaataaaggtcctgacttaatgatcttcaagacctagttagggagagatatatgtataaaaataattgtaatactgtgaaggaattattagtaacatgagcaaagtattgtgggaacatgagctagggcaatgatctgtgcctggggaaaccagggaatggctacctaaaggacatagttttgaatagtcttattttttaatagtcttgaagagtgaaaagttttattgattgctttggagagaaagcattctccagacagagggaaaagtatggagaaagataccgttgctgaattctgaaatcactccctataaaaccatacatgtaattgcatttcccccatttccagttcctcagtcaggaatcggaccagttgtattttatctttttactttcacataaggtattttttttttctatggcattttgttcccaatagaaactctagctcagtactcattagttgaagagatgagcaagtgagttaaaattgtgtatgtataaaacctgttctttccaaaatgtttatttcacaaatgttagtacagtgtgttagctagagaaacagggtactatattagagaactaaaaacacaggggcttaaatataactacttctctttcactcctaggtaagggagttcaaacctttggacagccttactcttcttaatgtatggcttccaatactagtggttgcccttttcagctagcagggagaagatgcaaagggggaggatttaaggcaagccacttcatttttaaggctgtgatgtagaaatcacacatcaccatcacttctagttgtatctcattggccagaacctactcacatgactacactgagctgtagaagatgctgagaaaggtaatctttagctgggtgggcatgtgtcaacctaaactggggggatggttgttttactagaggacaaacaaaatagatactgggtggatagggaggggcacattttctgccacaaacattaaggaattttttaaaaaaaaaactactactctcatcgtaagaaatgagtggcttttttctgaacttcctttcagttctccatatatattcgtaatttgtacacttgttattacagtgttggcatttgtttacacagccttctctgagcttgaatgtatttgtattatgaaaataaaaggattaaataagaacctaatatctggcacatagcaccaactaataacatctcttcctttttttattaaataattaaataattagttctatgtggcagaaacctgaggctcatctaaccagtgtacagatataaatacaactagaaggagaagaaagggctagagagctaggggaaaataatttatggttgaacttcagaacatcaagttagtcccaaatttaccctatgggggaagtgtgcgtccaaaaattctttcaagaattccctaaaagaaggctgcctcccctttttttaagagttagggtctggctcttgtccaggctatagtgcagtggcacagttgatagctcattgcagcctcgaacccctgggtttaagggatcctcctccctcagcctcccgagtagctaggactgaaggcatatgccacctcccccagctaagtttatatattttttttgtagagatgggatctcattatgttgtccaggctgatctcaaactcctggcctcaagtgatcttcccgcctcagctttccaaagtgttgggattacaggtgtgagccaccatgcctagcaagaagctctttcgaatgacattgacacttaagcagtagctataggtggaagggaacaagaggcataggatgagaatttagtacactatcctgtattctttagtaaataaaattctttgatttgtttatttatagctctctttgtcaagcacacaatcctccattataattctgtggaaaattagtttaccttctatcagggtttccccagcacccccaactggaatctaattcagctaatcactgttaacaggttaaaaataaaggaaagaaaaagtagggaaattatatgtacaagaaagaaaatctttatgtgctaaggacagaagtaaataaatgtatatgttatataattgaaaataaataacagatctaaggctttggtataagctgtctaatttacgtataatgtttaaatacacgtaaacagtctcttctctagtgctactagcacttgccgaggtgacttttgtatacatttgactttgctttctttattttattttattttatttttttgagacagagtcttgccttgtcgctcgggatggagtaccatggctcaatcttggctcactgcaacctctgcctcctgggttctagtgattcccgtgcctcagcctcctgagtagctgggaacacgagcatgtgccaccacacctggctaatttttgtatttttagtagagatggggtctcaccatgttgggcaggctcgtcttgaactcctggcctcaaatgatccacctgcttcatcctcccacaaagtgctgggttataggtgtgagccaccgtgcccagtttgacatttgccttctttaatgttcatttttatcttttcggatttttttaaaaagttttgttaagttattttatttctgttggcctagtttggccaatttattgacacattatacattagataattgtattttcatttttcataaattgaatgtttacttgcctgttatgttcacttctgtggcttttaaatttttccatcattgtacattttcactacctgcaaagaagatttcacaatcttggatgttaataaagaaaacttgtgatatagtaggttgcagaaatcacacctcttacacttcagtatatattttttaatttttttttcttttagaccattctctgtaacagtcagtatgtattttagaataaaaaaagtattcttttactcaaggcctatattgtttattaagttcaggaaaatttacactgatttaagagtacttaaattctcagtctgcattccagtttggtcaatcatctttccgtacagagattacatattgcatttgactgtcgtatctctttaatctccttcattctggacagttcctctttctttgtctttcatgacattggcattttgaaagactataagctagttattttatagaatatatttctcaatttgggtttttctggtattcacttatcattagatccaagttatgcattccttactctgcgtaccaggctggagaaccgtgttggtaatgatatatcttctaaagtgtttcacagctggagctcacattgtttgtctgtccctattagtgatgctacattcaatcaccaggacatggtgtccggtttctccactgtgatttctaattcatctgttacagctaagaagcaatttgtgagaagacactttgagtctatgtaaattatcctactcagcaaacttcccctagatgtagtatccattgatgattttttgcccaaaccagcattttctgtgatgattgcataattatggttttctaagactaatacccttaccagttgacattcagagctctatcagagccctcctctgtgtgtctgtttctgtcatcagcacagactcaagggttcctgttttatttactgagcagtgatccttaactgtctttatttttatgctcaaatcagatttggtcaatggaagccccttcaagtgggctctcatgtccttttgtttttcctctgtcctttttgacatgcctctatatatatatatatatatatatatatatatttttttttttttttcattttagcacaggaaggttgttagactcatcttgtatcttccctattgcagccttagagcctgccatttctcaaaggagctgtagtttatttaagtgtgcagtagtatttagaagtcaggatctaggtgctaggtgattgtaaatttaaaacttcagagaggatgagtttacattggttgataaatagcacatcaaaatacacactgtcataaataaaaaagatatctgcagagggccatttttttttgtatcactatttgtagaatcagagaactgaaaacaacatgtacatccttgaggcacatgaaacgatggtgcatctacaaaatggagtatatgcagtttcacaaagaataatatgtccactactgcagaatgatctccaggatataatgtgtatataatctgctaccatttatttaagagtgtaaaatatgttaatgattatttgtgaaaggggaatataaacattcttattcgtaatttgctcatgttaaaaaaggggaaaataaaaaatttttgaatggttactataggggaagagaggacatagtgtagaggagtcaagaatggaagctgaacttctgaccatagcttgttctgtagctccgaagttggatccaagtaaataaagcaacataaaatcaaaattagtaagaaagcagtctctatttaaaaaagcagatggtcctaactgtgccaaattggtggtcacacagagataaattattttacctgactttatagcagttatttgactgtagaagtgagtattcctgaaaacaaaaagaattgcatagtcatcttaactttaataatcatattgtttatgataatggtattattttgaaactattaaaattgaaataaagcaaataaatagtgccatttgcaaccaactcaacccgagtgatgacatgaacatacaatggaagtaaaaagcttgcagttttgaatttgaattacatgaattcttaatgtagtttctctaaaaatacacacatcctagctcattccattgaaacatcctaaataaggcaaccagtccagtagtaataggttcacctagtacttagattgcaacttagtttctaatttattataaatagaagggctttttgataaaatggctgggttatagcctcaggcaagaaatacgcaagatgagcctggtacatcctgtcatactagaaagataggcaggttatcaaagactacttcaggtcttgtcagaaggacttaagagctaataaagggtttcctgttggaaaaagatgggagagtttggaaatcaacaaggatgctgacagtagattaaaatttataaaataagttcaaatccatgagttcataatgggacttaaaaaattattggtctactttgaaggatgctggcgatttaactcattttgaaaactggtaaataaggaaaagaaataaaaccccttttcttcatgaactatacctcagagttaacaaatatgatgagggaaagtttctctttacagaagtgtaatgaagaaaagatgttttgggtaactgatgaatgatgtcaccattttactgcctcttattaatggaggaagacatatcatcatcagtggctgctaaaaatgctaggtatgaagtgatggggagctttataatggatggataaggctggcagtacctgaatccacagatttatactaaatctcacacaaaagaaaacaacaaaacattaaatgccatctggtagaagtccacaacaccacgtataaactattcttgtcaagaagaactgaatttgaatctgatcaagcctctagatataatagccagtttataagaaatacaagggatagaaaaatatgttaaatgataacacaagggtgcgcttagcaaaatctggaaagcagaagagtggaagaaacaattatgagactaaagggatagcctgattggatatttaatattcagtgtacttaatttaatgtttaataatattaaatatctttaatattaacgaagtgatcttttaagagatattggtattgcaaatgtttacaaatagtttcttagttgaatcaagattggtatgagttgctaattgtggagctgggtgatagattcatgataattcatcatattgctcagtttatatttgaaattgtatattaaacttgaaaagacactttaatttgaattactattttatcttttaaatgtggtatttctccttaatttaccctaagaaaacactataattttatcacagtacctattaatggtggtttttctttcgtgaattgaggaaaagaattcaatgggtttatttatttatttatttattccgtgggtgtattatctgaattaagaattcagtgtttttagcaatctacctaccactttaatactgttgtgctggtgagatttaatacactttaaggataattcaagtgttgtacagatatttcagttttataaaagattagtaatactggttattacctaaaataaaatattaattggagatcagagatttaatagccaaatttgtgagttttacataaaatatgtaaaactgtgtcccctatatctctttgatttacttatttattcatctatccatgaaacattgtactcttcatttaatgcttgacataagagcagcaaaaagcaatcccagcgctcaaggaacataaggtcttaggtagggtacctgaaaactacagtgattattacatcgtttgctcataaccaagatagaggtatatattccagaagttttgggagtgctgtggaagtaaacctgatttaacgttgggttgggatagagttggcagagatttgctggaggagtagctgtgaggtgggactcaaaaaattacataataaaaagaaaagagaaggaatggtacaaaggcaggaagtggaaagagtaagtggcttttagagaattacatgtagcttgccatagcttgaacttagggatttaagtgagcaactagttgaaaatagattggagaattagagagagatcctgaaaggtctcatagatgtttgttgaactttgttatagaacagaagacaaaaaagaaaggccaccatcagctttttattttagaaagagcatttgcagcagtaggtggaaataaaattactttattagggagaggcttttcacctattttagctcaaagttttaagtctaattttttttctggccccatgtatatttttctttcatttttaaaaatctctttttaaaaaaatcatgtaaaacatttacgtaattctaaaactgaagactcatttcaattgctgttccttctactcttccctccctctctttaggccatcattttcaaattagttgggttattctgccattgttgcttttcaaaaaatacaagcaaatatatataaatatttttctttcttatgcaaaagaaacattctataaacatttggtatctttttttcacttaaactgtatcttagatcattctatagcagtaaataagatattccttactctttttgctttttttttttttttttttgagatggagttttgctcttgttgcccaggctggagtgcaatggcgtgaacttggctcactgcaacctccgcctccagggttcaagtgattctcctgcctcagcctcccaagtagctgggatcacaggcatgcgccaccatgcccagccagttttgtattttcagtagagtcgaggtttctccatgttggtcagactggtctcgaactcccgacctcaggtgatccgcccccctctgccttccaaagtgctgggattacaggcatgagccaccgctcccagctctttttgcatattctttatcgtactaaagaacaactcaataaaataaatactttattcagtatttctaatacccaaggtaaagacattctaacaataaacctgtgcaactagagtagcatagcctcgggctgttgcttttatctccagccagtactactgcctaaagaatatgaaaggaaagatttctgtattcatttaagaattttgatttgttaacaagcagtttttactagctatgcatctggaatgactaatgactaatgagaattacaggcccacaatagcccccacaatttaatcattcatctgtctactgttcacatatttattgagcacccatctgtgtgaggcactctgctaggtattctggaaaaaaattgagtttcataaatatccattgtgtcatagatacaaatttaagacatcatgaggtctacttgttaaccttactgtgtatgatctctactttcaagatcttcagaggagatactttattgctactagcagaataatttaatagaactcacattcctcaaaagaaagagatactcttttatttctttgctgaagaattcatttaacagcactttcttctaagtgttttctgactactgtaccaaacttggttatatctttagtgctccccatacatgggaatcagttgtcttaaacatagcaaagaaggatatttattcatttatatgactgtctcgaggttaaatagttcttttgatgataaagacttcatctcatctcagtctgtccccagtgcctaacacatgatagttctcaataaagtttattgagtaaatgaaatattttgcttacctattatgttaagggaaaaataaagttgtatgtcaggaaaaaaaatcttttaatatccttgctaaaatttctcgcaaggtatgcaagtaaaatatggccttaaaaattaaaatttaatatgctgtttttggacctctaaactatgtgaccagagaggagacatgatggcaaaaatgatcttcatagcatatgcctttaagaagcaaattttaatttactgtttctatgaatacaacatttattccattagattgaaaaacacaacaatgcttattcatactttaagcatttatatatctcacctgtagaatcaaaattcttcctgcaaacttttatttctctgttctcatgcagaaattactaaattcttgctctggaaaaagagaattactgtgttgtcttagagtaatacctccatctggtggcattttagaaaattacagaagaggacaggaaacttgtattttcttgtatatctgtaaactgtattacctgtggtttctcataaagccaaatgaaattacatcaaaagcggagtcaaccatatgtaccagaaatttaatgccctagttttcaacatataaacaaatgaccttggggataattatataatcaactgtttagtccagactatttctgctctatcttggactaaaaattagaaatggaaaaaaggatagtttatgaaatgttaattgcttttttatgtgtgtgtatacacgttaggaaatatgagaatttgctatttcagatttattgctacagatccacaaagaacttattaataagtgattttctcagacaagcagtgttactgattttttaaaataaattatattttatcatagctcggttataataaattatgttctcctggagtgatagagatggaaacttgaaaacaagcagaaactacaaataaatttctgcctgttactgtaagaattttttttaacacatttaatcttttcttcacacatttcttactttattattgctagagctttataaaggtaggtaccatgccttcaacttcttgacttctcaaagtttctaacccaggattttgtacttagtagattttgcatattgtcttagaagaagattacaatcttattgcttatgttttagccataaaaatctataaaatatgtcataaatctatcaagtatgtaataatctatcacgtataaataaattatcaactatggcagttgttactatagattaaatcaattcctttttcttttttttggccaaagatagttgaaatattaagtatgaagtaaaatttaatgatttggggctttctgctgacgtctaagaaaaattaaattcctaatgaattttgtttgaaattgtttattttcaaattatagccagtcggatgatgattctgggtcagcttcaggctctggatctggttcgagttctggaagcagtagtgatggaagcagtagccagtcaggtagcagtgactctgactccggatctgaatcaggcagtcagtcagagtctgagtcagacacttcccgagaaaacaaagttcaagcaaaaccaccgaaagttgatggagctgaggtaatcaataaaatacccaatgaaaggtagattgcttgtattactttgggaaaatttagaggattggtttataccattcttaatctagcttttagagaagacaacattttaaattaaaatttacttttagtgattctcacattcatggtggtacacctgtggactaattggcttggaatagatgcattttcgaactagaaaacacaaagtgtaaattacacacaggcaaataaaacgttttctgcctcttaggcagaaattgagtttcataaatatccattgtgtcatagatacaaatttaagacattgtgaggtctacttgttaaccttaccgtgttatgatctctactttcaagagcttcaaaggagatactttattgctactagcagaataatttaatggaactcagattcctcaaagataatgatggaatagggtaaggggctattctgtttggaaaaaactacaagagatacaaaaacttgtctatacttcgtggtagtatacagtgttactcagagtaccagtctgtgatgagataagatgcttgagggccagaatataaatcgacacacagattccttcatagagaaaaatgttgctaccggccccccgctcaaatctgagctaaaacaatgtgcctagtgacatcgttgacgtatattctgactcagcctcttcacctcacactgataaaataggtaaccacactatgagtagcactaatacaaataatactcttagcatcaagaggatattgattaatattgtctgtggaactcaacacaccatttttttttatacataactagagctcagcattttatttaactatattgcaatgataattgtgttacatataggtaaggaatatagtctttattactttgaggcagtaaagatggtggtatagtttttcaataaattaacctttttttgcagttttcttaatacttcttcattcactggtttatatttctattatagttttggaaatctagtcctagtattctggccgttcagagatctgcaatcctcaagaagcagcaacagcagcagcagcaacaacaacatcaagcctcatctaatagcggatcagaagaggtgcattttcatcatgagctattattttaaaagtggacatgctgctgaatcagttaactagtatttgtgaaattattaaaaataataagtgctttgaaagaataagtaggaaatactttaagtgtatatatcaagaatcttgaaatacagattttgcattatccagtaattccaattttagggattaatccaaaataagcagtgggacatttgtgtgcatttgctcattacagcaaaattagaaataaactaaatgtgaactctgtgggaaataattaaatgtgatatgcacctacacgcatatacatgtatgaatgaaggaatattatatcattaaatcatatttgtacgaaataataacagaaatctcaacataatatttttgaaagagtagatggccactatacacaatgtagtttgtgtgtgtgtgcaagcatgcatacatgtatgtttgcacaaaaacattcaggaaaaattataacaaaaagtaatggtgaagaaaaaattcaaaatttggcatgttggcacctaggatttcttgttttggctatactaggcaacaataatggtctccagtgagggtagattttaaggtttcatacaaagtgctgacattttgctatttacttaatttcactggctatattaatttgcaataaaaatgttattactttcagctagttaacataaataaaactacattgaaaaaaggcttcacaagtgctgttatttgtaaagtgaatgttaaatagtatagcaaataaaaatttaatatggttaaattctaatcattagtggatgatactgactttatttcttttctacaggattcctctagcagtgaagattccgatgactcatcaagtgaggtcaaaaggaaaaagcataaagagtatgtcattttgttcaactgactacttcattttagaaaaatcctgattatttcatatttctttctttatgaaaattgttgccaaaaggagactcttctaaattcttagttcatggcattttatgaagttaatttacaccattacacaatttaaagataaatctttaacatttatctttctgtgaccacctgagggtattatgccatttctttatctcctgtaactccccctatatatttttaaactttaatgatctccctagttgtaatatcagaaaatcttaataacttgggaatataggagtatagggatgacaggatgactgattttggatggttcttataattatattaatagctatccttactattcagttgcatgtgaaatttacttcataccgtagaactcattttagaaactcactgtaatttcctaaagatctggacccagaaagtattaagaatacttcagattctcaatccatgtttattttaatgatttggaaacattattccattttcttgtcttttattttcctatttgcctttgatattctgcatattagatttgttacttatttttcccaaaaaaagattcatgcatttttaatgcgaagatttgtatcttttattagtctgttctatcttttattctgaaaattcaatcatttatctttggattttttttcctttctctttctacaaatctctctggtcctcctattaatagatgtatattggatcatccagttttttttccattataaaaatacacaacggaaactttttttcggtgtgcaagccctgaaaagatctcaaagtaaaaaatttgcttctactatgtttttatcataagcagattttatcatatatgcttgtttatgtagccttcatcatagttacaattggtgcaaaagatacagagcaatgaagcagaagcatagctgaaataggatatagtgtatttgtaagaattcaatgtgtgcctttcatttgaacttcttatgatagcaaaatattaacatccattatttttctctacatgttgattggaatgaaatagacttaatagactaaaaataataatacaggtaaggtactcagattgaatatttgagatggtactactgttgctcttttttttttttttaatttttctatgtttcttaatgaacgtgcactatttaaaaaatcagtttaaacaggtgtttttcaaaatcacaacctctcgaggattaaaatggcatggattagtatctcttttttgagagggcaagtagaataattttatgagattttcatctataatgaaaattaaaatatcatttatttgctgttcactgacgtataactaagtgattagcaaaactagagttgtgagagaagtctatgaagaatattttccagagtgtttttgttttataaatatttcatttttagcatgagtaaaagcaacagtatttttgatagcgaatatagtttggttgatttgatcatctttgtattagggataaaacttgccatataagtacaaataaaaatactttataaattttgtctgcagtgaagattggcaaatgtctgggtcaggatctccatctcagtctggttcagattcagaatctgaagaagagagagagaaaagcagttgtgatgaaacagaatctgattatgagccaaaaaacaaagtcaaaagcagaaaacctcaaaataggtatggtctcagtttggtgctgaaaattgattgtggaaagtatttgttctttttgtatatagtttctcaaatcttgtttttttttctctttgcactttcctagatctaagtcaaaaaatggaaagaagattcttggacaaaaaaagagacagattgattcatctgaggaggatgatgatgaagaagattatgataatgataaaagaagttctcgtcgccaagcaactgttaatgttagctataaggaggatgaagaaatgaaaacagattctgatgacctactggaagtctgtggagaggatgttcctcaacctgaggaagaggaatttgaaaccatagaaagatttatggattgtcggattgggagaaaaggaggtagtttttaaaaaaccatttattgtttggttatttaaataatatttacaggagtagagggctgggcacagtgggtcgcccctgtaatcccagtactttggggggccgaggccgatggatcaggagttctagacctgaggtcaggagttctagaccagcctggccaacgtggcaaaaccccatctctactaaaaatagaaaagattagctaggtgaggtggtgcgcacctgtagtcccagctacttgggaagccgaggcaagggaattgcttgaacccacgaggctgaggttgcagtgagctgagattgcacgactgcactccagcctgggtgacagagcgaaactccatctcaaaaaaaaaaaaaaaaggtaaagtatttaagatttttctacagtgttgaaagctaagagggtggattttttgttgttgttgttttacttatgttttataaaagctactttgcttagcctgagtaccttcttaataaccacctgaccacatttcttttttctttttttttttttttgtgacagaatctcgttctgttgcccaggctggagtgcagtggcacggtctcagctcactgcaagctccgcctcccaggttcacgccattctcctgcctcagcctcccgagtagctgggactacaggtgcctgccaggacacctggctgattttttgtatttttagcagagatggggtttcaccgtgttagccaggatggtcttgatctcctgacctcgtgatccgcccgcctcggcctcccaaattgctgggattacaggcgtgagccaccgtgctgggcctccagctgaccacgtttcatatattgtggataattatagaataatgctgtgggatctcaggtggatctctgtctttttattttttctaattcgaaaaaggaggggattatattagataattctgaaattctcagttttatttatgagcaatagaatttcccataagtttctatacccccaatactttatttaaaagagtatatatttttgtactcatattattgaaattttgagttgaaatataatcctacaacagaattaattacatggaaggatcttgtgcttttgttttcagctactggtgctactacaaccatctatgcagttgaagcagatggtgacccaaatgcaggctttgaaaaaaacaaagaaccaggagagattcagtatttaattaaatggaaaggatggtcccatatccacaacacttgggagacagaagaaaccctcaagcagcagaatgttagaggaatgaaaaaattggataattataagaaaaaagatcaggaaacaaaaagatggtaagtatgctgtatatcatatacttcttttaatagttcaaagattactaaacctttatgttaataaagaatacatagtaacattaaatgatagcctaaaatagctatagactttataatacagttggctgtctttgtccacagcttctctatccttggtttcaaccaaccatggattgaaagtattcggagggaaaaaaaacaacaataacacaaattaaaaacaataccatgtaacaactatttgcactgcatttacgttgtaaatgtaaaattgggtattataagaacatctagagatgatttaaagtatgggggaggatgtgtgtgggttatattttaggtaccatgtcatttcatataagggacttgagcatcctcagattctggtatctgtagaggatcctcaaccaatcccctgcaggtagtgagggatgattttattccatctcaaggtaaaactcctagaggtatacctatctaaacctatccttggtaacagtcacatagagtgtgtctcatacattataaattacaaatttttagttaaaaattaatgatgctttattcctgtttgagtttctttattactcaaacttggcccacacagtggcaaaatgggagattttgtgctacaaatagtgttggggatgggggagtgaaaggttatttatgggagatttttaagtctattcctggattaataatttttcaggttgaaaaatgcctctccagaagatgtggaatattataattgccagcaagaacttacagatgatctacataaacagtatcaaatagtggaacgtataattggttagtgataaatgattctagttaaactttctttttatgcttgaaataatctgaaaaaagtcataagtttgccacttacatatcaaacacagtagcttgctcttactaaaacagtattgtaaactagatagctaaattttacttgtgtagcctttactaagaattatgtatctgatgattaaatgtaaaaaaaaataaataaataagtaaatgcctgattctctcacagctcattccaatcaaaagtcagcagctggttatcctgattattactgcaaatggcagggccttccatactcagagtgcagctgggaagatggagctctcatttccaaaaagtttcaagcatgcattgatgagtattttagcaggaaccaatcaaaaaccactccttttaaagattgcaaagtgagtattgtctaacattttaaattattaaaaatatatttatacattataaatatttacaagcctaaatacaagagttggatcctgatttcagatagactaagggagaatatttcttggttaataggtcttacaggaagtgaacttctgcaattgctgtgtgttttttagttttagttttataattttttatttcaaactttctcttaaaaaaattgtaaatgatgttttcgtcaatgtatcttcttaagtgttgtcttttatcttgttgagcatcactatgtcagaaagatgagttggttatggtgattgtcaggaagggttgggagaataaacagaaaaaaacccttggaaactagagatatgctcaattttaaagatagtggatattttcttagaaggtagagaaaaaggagagtgatataggaaagtatccagaactaccttgcacaatactttctgcatccttgtaacttacccagagttactagtgatgtgttgagatctatggactactagactttctttccttattacaagaattacattcttcatagggataacttggaattcagaaattgaacggtaagctaagccagttttatggtttgtagcttaaggctggagtgatggttttgaacaatttaacgtaggttttgcttgtgaaatacatgagactcatattttggcaggaagttaattttctctatacatttttgtttaaaaaagaaggcaaaatatttcactgttcatttttgtagagtagtagaaaacagtattgactgaatcctcaggtacattttgagtaatggaatctctgagcttgatgattagagatgaaatttaagaatttatggtaaagctgaggctttcatcttttagtataatttcttatatttaataactctacataataatgtttatttctactaaaggtattaaaacaaaggccaaggtttgtagccctgaagaagcagccatcctatattggaggacatgagggcttagaattaagagattatcaactgaatggtttaaattggcttgctcattcttggtgcaagtaagtatattttgaatcatctatttaatttgacagagtaagaatttaccaatacaggattcagaaaagatttccatttacataaaggataagactctttggcagtttatatgctagtctttgtatttcctagtttgtataaacaatacttactacatactaggaagaaaatccagtggagttggagtttaacttgattgttgcctttttaaaatatgtttttattcagtttaaaaatcaaaatgcatatctgttctcatcccatgctattcctggaatatttctctttttcctagttattttaatatccatttactcttctacattttttttctatcttctatggcccccactctacttttgtgaatctcggttgcaatttagctatagttttttttttttaatctgtgttcttcctatatactttttacttatttaatatatctggactctactactagtagatgaattgcattattggcttcataattgattaaacataatactattaatctttaagcctcttctggcccaaaacggtcatctccttttacttttcttacagcattagtgattaagtctttagccagatacctttacatttattatttgtagttaataaaagtggtatattctatataatacctatcaattttatttaacttcataaaaacatatacacatgatgtaaaaaggtttctttgtatatttgaatatttccttgcatgctaatttttttttaactttgtagaggaaatagttgcatactcgctgatgaaatgggccttggaaaaacaatacagacgatctcatttctgaattatttgtttcatgaacatcaattatatggaccttttttattggtagtaccgctctccactcttacttcctggcaaagggaaattcagacttgggcttctcaaatgaatgctgtggtttatttaggtgacattaacagcagaaacatggtaagttgtttccctgtaaatgtagaaatcaaaatgtacttgtctttgagatcaagtgtttttgttgttttgagatggggtttcactctgtctcccaggctggagtgcagtggtatgatcttggctcactgcaactgggaccacaggagcacgccaccactcctggctaattttttatattttttagtggagacagggttttactgtgttgccaggctggtcttgaactgagctcaagtgatctgcctcccttggcctcccaaagtgctgagattacaggcatgaaccaccgttcttggcctaacaaggatgagaggttttgttttgttttggtctgtataacagtctttgtttctggtatagaacttgccacaaataagttctcagtacatgtttaattgactgtaacaaagtcagttttggtttagtgttacttagtatatatatttgactgtttttttggtgggtttttttttttttgttttcactctgtcatccagactggagtacagtggtgtgatctcggctcattgcaacctccacctcccaggttcaagtgattcttctgcctcacccttccaagtagctggcattacaagcgcctgccaccaggcccggctaattttcatatttttagtagagatggggtttcactatgttgcccaggctggtctcaaactcctgacctcaagtgatccacctgccttggcctcccaaagtgctgggatttacaggcgtgagccaccataccagcctattttacatttttaatggaaaatttcaaatatgcatgagaacagacagaagaatgtaataaacactcatgttcttaagtttcacaaatttactgctagttttgttttgtctatacctctacacacgactttcctagttactgtgaagcaaaccccagacatcatatttcatccataaacattacattattaaatgaattaatcacttatgttttcttaaataagaccttttcgtttgtgaaagatgtgctttaaaattgtgtttacttcgttttttaagaaatgctgtggtatttatgttttatttataagatttacatagcattttggactatataaagaataactctggccgggcatgccggctcatgcctgtaatcccagcgctttgggaggccaaggtaggtggatcatctgaggctgggagttcgagaccagtctgaccaacatggagataccctgtctctactaaaaatacaaaattagctgggcgtggtggtgcattcctgtaatcctagctactcgggaggctgaggcaggaggatcacttgaacccgggaggtggaggttgtggtgagccgagatcacgccattgcactccaccctggacaacaagagcaaaactctgtctcaaaaaaaaaaaaccacaaaaactcttttattacataaacatatattaatagttacttacatatttgaatggattttaatttttagatatgtaagtaaaagtataatttgcttgatgtttgtcttaaaaattgtccttcaaatttcttaatagataagaactcatgaatggacgcatcatcagaccaaacggttaaaatttaatatattgttaacaacttatgaaattttattaaaagataaggtatgtatttatttctcacgtgttttggtctcttgtatatcagttttttctttatcatatgctgtggacaagatgagagaatagcctaaatcgtgagtcagcaagctatagcctgtggtcttatttttttaatggtgcttgaactaagaatggtttttacctttttgaaaggttacatttaaagggtcttagaaagaatatgtaacagagaccatatatttatctgcaaagtctgaaatatttactatctggctcttcttagaaaaagcttgccaactcaatcgaatgaaaccagtttgttatagtgtgtattgatttgtaagctctttaaagaagaggaagatacctaacaggattaagctaccactgtgtgaagcagtgaaggctttatagatactgtcttatttaattcctccatctactttatattcactttctctactttatggaaaagaaaatcagtctcaaaaatgtctcaaagaatttaatgaacttggctgtggtaacacagctcttaagtagcggaatcaggcctgctctaactcagagacctaagtttaagagagttctacagttcataaaagttgtacaaagaattgtacctacacttggaataagacactgttctgaatttgtgtcatagtttttttttcatattgacattaatagaggcttctattggggttaggctaaaaatcttttgtaaaaattttaaatgacactgctgatttttctccgttaattatcagtttataagctaataaaaactttggcttgatattacattctagtggttaaatttgtcatagaaggaatatgtgctgagttacttatgtattgtaatcttgagattacgattttttatttgaaaattagacaaagtttgtttttaatttttatttcattttaataattgagttcagattaaatgggaaggctaaatttgaattccgtttttctctcaaaatactgtttttctattattttaaggcattccttggaggtctaaattgggcatttataggtgttgatgaagcacaccgattaaagaatgatgactcccttctgtataaaactttaatagattttaaatccaatcatcgtctccttatcactggaactcctctacagaattccctcaaagagctctggtctttgctacatttcattatgccagaaaagtaagacaactttacaattttaatcatattgtgtggatattatgtttagtgggaataaacccaggtaataaggtcagtaagagtttttattgccctaaaagattagatcacagattactaagaattttttaaaaaggaaaatgaggtcaggtagtttgtaatactatttgaatttttcaattttgttaataaacttaagccatgtgtaataaatcacgacagttgattttgcacattttcaaaatataccttgtttgaaaaactaacacagtaccattctttgtatttaacagtaggagtaacaacaatgaggtgctggtaatccctttttctaaatgaggaaaactagactagacaaggctaaataagttcccaaaggtcactacttgttctctttcagtaggtccagaactttaaaagtatatttttttgagaaatattttagtgataattactcccatacttcaaaatacttcatattcacttgattcaagaatcataacttataaaacaactaattatatttcatcatgcatcttcttgggagggagatttttagaggtaactaagtttagctaatttttttttctaaaaatctgtagtattttgtttataaatgactcccctaaaaaaaaaagttcatacacaacatacacaatttgattttttctagtaattgttccaatttcttaaattttaaaggttttcttcctgggaagattttgaagaagaacatggcaaagggagagaatatggttatgcaagccttcacaaggagcttgagccatttctgttacgccgagttaagaaagatgtggaaaaatctcttcctgccaaggttgagcagattttaagaatggaaatgagtgctttacagaaacaatattacaagtaagctgtacacagaacacagttctgaacttctaattctgaaaaccttccatgtctgtgtcctgcttttggtgcccccaccttctctacaatagtgtcttagagcagttgcaattctcgagtttcagaataagtttattctgtgtcgttaggaggcaaaaggagatttaatgacatatccaaaattatgagtgacaacactgagtaattcatcttctgacacataattaattgctttcctatatatcatactgttatcttataaagagtttaagtgttaggatttccacaataataaaggtattatatgattatgacaattaacagaggccaaaaaaagaaacttagaaaaaaattttaggctctgctgctttttgaagagtattaacaaatcatagctggtataaattttgtatgtcaagatctatacagtaggacttttcaaagaatcagaaaggaaaatctgttctaatatctgtttaaacatttaattgcataaaaggaaatatattgctacatgcatttggagtttcagaaacatttatattctatggtaaatctataggtgccatacatttgaaagaatatacttaattgcataattatttttattatggaagatgtcagacatatacaaaaataggataatttaatgaactcttatacccatgactcagcttcactttctttcttttttttgtttgtttgttttttgagacggagtctccctttgtactccaggctggagtacagtggcacaatcttggctcactgcaacctccaccttctggtttcaaatgattctggtgcctcagcctcccaagtagctgggtttacaggtgtgccccacaatgccctgctgatttttttatttttagtagagacagggttttgccatgctggccaggctgatcctgaactcctggccccaagcgatccacacgcctcagccttccaaagtgctgggattacaggtatgagccactgtgcccagccccagcttccctttcaactcatgccagtctttttatgtatctctggtcatccccatttccctcagtacctgtccttttgaagcagattggaaatttttccataaatatttttctgtgtatttctaataattgatttttaaaaatactagtatcacctgggcccagtggctcatgcctgtaatcccagtactttgggaggctgaggcagacagatcacttgagcctcaagagtttgagaccagcctaggcaacatggcaaaaccctgtctctactcaagatacaaaaaacttagccaggagtggtggtgggtgcatgtggtcccagctgcttggtaggctgaggtgggaggatcgcttgagcccatgaggcagaggttgcagtgaaccgaggtcatgccactgcactccagcctgggtgacagagtgagaccccatcttaagtaaataaataacccactttaaaattttcacaatttaggaaattattgctctctcagcagaatcaatttcttgataccaatattcagtatcagtgttcaagttttctctgttgtctcaaaaaatttttttacgtttactcgaattgggattgagataggttcatatatggcaattgatttgtctctgagtttattatctataggtacttcttttttgttaaaatgtatacgatggggaaaacagttattctgtagaatttttccacaatctagattttgcatagtacttccctctaaaatagtttaacagtatcctctgtatttcctacagattggtaggtagatgtaggtgcttgataatattcaaattaataattatgagaagagtatattttgtagtacacaatggcgattatctaattttgttatggggttctttaaaaaaagtaatgcattttgtagaatatttagaaagaaaagtcaaagtaggaagaagacacattcacctgtaattctcttagtgctagtcatatatcatggatgttgaacttaaactcttcaaggtactttttggcaactaaggtaataagatactgccataaatttctggaaaaattcttagaatttttacctctagagaaattaataataaattttttctggataaggaaaaatattctttattcttgattacctcttagggcattgagcattgtccatgggtttcgttttgcttttcattccagttttggggaactgcctgtataactagtggtaaagaatggtaataaaagagtatgtacactagatatttgagactttcaagtcccttcaaaaactgaccttgtaaaaaggaagaaaataaaaggtggaaaaggtcatggtgagaggaaatttttcttttcttttttaaattcagcttttattttagatactggaggtatatgtgcaggtttgttacatgggtaatattgcatccaggtagtgagcatggtacgcagtgggtagttttcaacccatgttcccctccttccccactctagtagtcgacagtgttgttacatgtttatgtccatgtgtgctcagtgtttaacttgcacttgtaagtgagaacatgcggtgtttggttttctgtttctgtgttaattcacttagattatggtctacagctccatccatggatattattttatttgaagggcattatttcatccttttttttctgtggctgtgtagtattcatgggatatatatacaaaaatatggagtgttcatggatttgcatgtcatccttgtatggggaccattctaatctctgtattggtccagttttagtataaatgctgccgaagtgagcacaggaattgttacatgtagtttggagtagtaaaatatcaccaagatgttttctataagttacatatgtattgtgtaattgcaatctagagaaggcagtcgtggctaaaaccaggtatcctcaggtttcttttaggtccatgcaaaataattcagtttcattagctgtctaatgcagtaaaagttgtaagaagattcagataaataatgcagctgaccatctttttagcaaatttgaggggaaaggattaatacactgtaataattatgttacattagcctgttctgtgtatagctaatggttcagaaaacaagttgtgttctcatgagtattatgaaagaggtttggtccgttgtatatacagctgtgaattttataacggtacagttttactttggtactatcgttggctttttttgtttgttttaatgcttttagaatttatcctggtaattgttctgctaaacatcgttttcataatttttttttttaagatggattttaactaggaattacaaagccctcagcaaaggttccaagggcagtacctcaggctttttgaacattatgatggagctaaagaaatgttgtaaccattgctacctcattaaaccaccagataataatgaattctataataaacaggaggccttacaagtaagaatttttaaatgttgtttctttgtgataaagttctagaaatgttgatttcacttacaatcgaaaatggctcaatgctttaacttattggataaaagttctctttagttaatggtgcctttctataatggtctcagttattaatctttgtagaaaagactttaaaattctaatttatgtaattattttgatgaattttctaaaaataggtctctcaaaccatggcctataataacttatccagcaagaaaatcccacagtatgttcataattatgaaaaaatcgttaatagtaattgtgctgcatttgtgatttggtaaatggtaatctaaaggacatcttgacctcacatcttaacccttcctggtacttctggaagataagtcagaagtgcgaaggcacagctgcaatccagccactgtagtgcattgaagggctaggatcagcatctagaattaatacattagaatgcatttgcttactctttttaaacctttggttgcttagttgctgctgcttctgatgtcattgttcttcagctaagatttttggagaaacactgtggtatagtaactagcaaacagagtgaacagtacttttttcctccccgatagtataacaaaacctaggtgtgatatggcaaagggtattttagcttcagtcatagagtgaaatggtaaaggtcttagaaaattttgaaaagtgaaataagttgttttctaacatgaaaatttaaaatctcaatttaaaataattcaggcaactaaagtgttacgtggacaacttaccatttatgtcttttaacatataacaacttgaattgtttctgtagcacttaattcgtagtagcggaaaattgattcttcttgacaagctattaattcgcctaagagaacgaggcaatcgagttcttattttttcacaaatggtgcggatgttagatatacttgcagaatatttgaaatatcgtcaattcccctttcaagtaagcatttaattgtatttgttgttttaaattttatctaattcctgtgcatattttacagaattaactgaaattattttataagtgtttaggtttttatataaactgtactttttctttaaaaagatgtatctgctttaaaaaatatttgtcattcccggtttttcttgactttacatattgcaacaaaacaatttttcttcctttcctgtgatttttattttcttttaattctgtctttttcttctatgcttgctttagattttaaaaactgaactaaggcagaattttcttgattggatagatctaaaagcaggggagcctttagtcttcaatctgaatgaggaaaacagccagtagtctctgaatgtgaatgctgccaagattctgatgattggtgtgctcatagttatctgacacagggtttgttgagtaaaactagacaactttacagaagaaactaaagaccaaaattcccttccatctattcaaaatttatattgaagttcattcaatataactaaagctaatattgatgagtatttaaagtcaggtgctgttttcagtacttcagatctaattacttaattctcaaagcaattttatgaacagtactaggaacatagcagacattatgtagatacagctagtaaatgctgtatatttagtgcagatagtaaaatagcagtaaaattataataatgggactgaacacacaatccctgctttgtcagagcttatcatctcttacaggagacagacatcaagcaggtgattacaaataaatgtaacattacaattctggtaagtgttgtgaagaaggacaggtatttggtgataggaatatcattgagaaataattgcagtcatttaggggaaaacgtagaagagtaccattagttgaggtttttgaaaacacctttattgatacgtaattcccatatcatacagtttactcatttaaagtatacaattcagtggtttttactatgttcacagatgtgtataattgttcgacaggtggttttagaacattttcatcagaaagaacctgtagcctttagctattcctcttgtccttccatttgccttcctcttctgccctgtgttgatttgtttttaaacaaattattgtgtacatagtcaaacaaaaaattagtttgactaattttgagtgttaataagcgccacttctctgttgctaattccttctcattcctaggtcacttcctggagagaataatttttaattttatttggtttaggtcatgccacagtaatgagatgccactattcttaaaatttgtactaatatgtattttagtggaaaagaaaaattattttaattttttaaaactttaatagacatgttttcctactttgagtaggtgataattaagagcacttcatttaaaccacttagaatacatcatttaaaatgtttatattttttcttcgcagagttaaaattcatatagtaacaaagcaaaggtaggcatatggcttcccaaaatactagtttaattcgtcggttaaatgcatggatcatagtagacaagttatttctagtctataaccagttaataattataaaatcattgccatttctaaagtgaaatagcagctaatgtttaataagcgttcagtatgttgtaggcactgtgctacatgttttcctgtgttctctcactgagttctctatagtctatgaaggagggactactattatgtctgttttgtttaaagcggaactgacatggtgaaaaagtttgtggagaaaagtcaaatcacttgctcaagataccaagtgaataaaatactcatttgctggctgttgactagaacccatgatgcttcacatcaataattttcaaactttagtgtgcatcagaattaactggatggcctttgctaaacaccttcagtaggtctggggtaggactcaataatttgcttatctatgttctcaggtgacactaatgctgttctagtaaccacgctggacttaatcagtgtttttaaaactgaattgtaacctgttaatggatctgtgaatcagtttaatgggttgcaccaacattttgaaagtaaaatgataaaacatgagagtataacatagtatatcatgtcatgatatgaaactgtttcaggtgtttgcaaacagctatgtactcaatcacatacttttagaatggggactcaggcagaatagtatgacagcctatgctgtatttactcttgagggtgcagtcttagtgatttggagcacagactaaagacagaatgcctgagcattattttactgtctagtaagtactttctattatagttttagcaaaggacatgcttcacatttctacttaattttataattgattttaattgctttgtaatactttgattctgttatatgcagtattttaatgtgtttttttctagagattagatggatcaataaaaggagaactgaggaaacaagctctagatcattttaatgctgagggatcagaggtatgtattagtgcttttaaaattataaataattttgatttagtatcagtatattacattattatattcagacatttttaatcttcatatctagtttgataaaaaaagagtggtgttagccacctttgattagcaaatgaggttttaaagtcactattctagtttaaacctaaggattttatctttgagacagagtctcactctgtggcccaggctggagtgcagtggcacaatctcaactcactgcaacctctgcctcccaggttcaagctattctcctgcctcagcctcacaagtagctgggattacaggcgcgtgccactgtgcccagctagtttttgtagttttagtagagatggggcttcaccatgttggctaggctggtcttgaactcctgacctcaggtgatccacctgcctcagcctcccaaagtgctaggattacaggcatgaagccaccgcgcccagccaagaattttactctttattatcaataatgtttcagcatggaacagttattttaatttgcttcaaaataaattagccagattgggcacagtagctcacccctgtaatcccagcactttgggaggccaatgcaggagaatcgcttcagaccaggagtttgagaccaccctgggaaacagtgagactgctgtctgtacaaaaaaaaataaaaataaaaagtaaaaaaaataaactgggcatagtggcactcggttgtagtcccagttacttgggaggctgagttgagtggatcacttagctcaggagtttgaggctgcggtgagccatgatcatgtcactagactctagcccaggcaatagagtgagactctgtctcaaaaaaaaaaaaagggaaagaaaaaacccaaaaacaacaaagtagcccactttcctttaaaaaaaattttttttatttccgtggatttttgggaaacaggtgatatttggttaaatgagtaagctctgtagtggtggtttgtgagattttggtgcacccttcacctgagcagtatacactgaaccaaatttgtagtcttttatcgctcaccccctcctaccctttccctctgagtccccagagtcctttgtatcattcttattactttgcatcctcatagcttagttccctcttacaagtgagaacatacaatgtttggttttccattcctgagttacttcactcagaatagtagtctccaggctgggcgtggtggctcacgcttgtaatcccagcactttgggaggctgagacgggcggatcatgaggtcaggagatcgagaccattctggctaacacagtgaaaccccatctctactaaaaatacaaaaaaattagctgggcgtagtggcgggcgcctgtagtcccagctactcgggaggctgaagcaggagaatggtgtgaacccgggaggcggagcttgcagtgaaccgagatcgcgccactgcactccagcctgggtgacagagcgagactccgtctcaaaaaaaaaaaaacaaaaaacaaagagttagagaccagcctggccaacatggtgaaaccgcatctctactaaaaatacaaaaattagctgggtgtggtagtgcctgcctgtaatcccagctactcgggaggctgaggcaggagaattgcttgaacctaggaggtgaggtggaggttgcagtgagccaagataaaaagagtgagactccgtcaaaaaaaaaaaaaaaaaatatatatatatatatatatatatatatttagtctccaatcccatctaggttgctgcaaatgccattatttcattcttctttatggctgagtagttttccactgtgtatgtataccacagtttatcttcttgttgattgatgggcgtttgggctggttccacattgttgcagttgcaaattgtgctgctgtaatcgtgtgtacaagtatctttttcatgtaatgacttttttgctctgggcagatactcagtagtgggattcctgggatcaagtggtagttctacttttagttcctttaaggaatttccacgctgttttccatagagttctttttttggtatatgccttttattttttaaggaaataaaatttacagttagagttgaagtgtcattcctttcctatcccgttttctttctttttcaccagaagtaaacactgtattgaatttggtgttaataacatatatatttgattttggagtctttttgttgattggtcttgctagatgtttattagttttaaaaactgcctttctgtttaattagtaccatactgcttacgttcagaaaatcaattgaaaaatttttcattttgattattcaatttcttacaggatttttgctttttgctgtccacaagagctggaggtctagggattaatttagcctctgctgacactgttgttatatttgattccgattggaatccacagaatgatcttcaggcacaggctagagcccatcgaattgggcaaaagaaacaggtatttttaattttaatttatattatattgctgttttagaattctttttttttttttggaagtgatttcagtttatcctctagaggataagatcactgtaacagtcatactactgtttaaccgataggatactgaggagcttggtttaccaaaatcacctggagagtctgacagaattgagataactatgcatatataggatcatgtattctgttttgatcccgtattctagtcgtaactataaaatgcagtgtttttcattttataataaaaactttaaaacgtctttacttgcttattttaacttgaaagggagtttgagtagcatatgctacctttctgttagtctatattttgtccatgtgcttacaagattctccacatgtaaacgtgaccccattttataattgtaacaacatacccttaaatggtggtactgaacctttacctagagaaatagggaaaatttactgcagaatctttgacctagagaaatagggaaaatttactacaccaattcttttcaattttggagagtttgttttatggtgggtttcttattaacttggggagtagttcatagaattttgcattatatagagtgatgaaacattagaatcaaggcaacgagtataagaaggctatcagaagtttacatgccccccccccattttccccagctaaatcataacataaaaattactgtcattcctttaaaaaaaaataagcaaatgcaatctccttatcaaaatattaagaaggaaggaaggatatagtttcaaaatagtcccttaagttgaggaactctagctttaaacatgttttttaaattttcattttgcttttaaccagtgaaaacttcatatagaatgagcttcaatttgtgtgccagtgtttaggcacttgaggttagcaaaacaaatcctttatactgcaatttgtttcctcatgtgtatttttacaggtgaatatttatcgtctagttacaaagggatcagttgaagaagatattcttgaaagggcgaaaaagaagatggttttagatcatcttgtaattcaaagaatggacacaactgggaagacagtactacatacaggttctgccccatcaaggtggttacttgattattaaaaaaatgtcattttagagtcagtaaactcatatttttgatatgttacatcactgtagatcattgaggaaatgtattcagagttgtactttttatattttggaagactttggactaatttctagttagaagacatacttcaaatacctggtttcatcgctacagatttgtaattttaggggtaatctctttcacttctatgcttcaagttccttattttaaaataaatatactgcactaggcaacatagtgaaaccccacctctgcaaaaaataaaaaacttagctgggcatggtgacacacaactgtagtcccagctactcaggaggctgaggtgggaggatcagttgagcccgggaggcggaggttgcagtgagctaagattgtgccagtgcacttcagcctgggtgacagaaggagacactgtctccaaaaaaaaaaaaagggattctaatacttgatttgtctaacttcttcatgtaactgttgtaaaggtgaaaatgtcagtaattaataaaagtgctgtgtaactgttatatttttaactgttaatgttaagcatttttgtttttcctgttttagttctactcctttcaataaagaagagttatcagccattttaaagtttggtgctgaagaactttttaaggaacctgaaggagaagaacaagagccccaggtaaaaaaaaaaaaaaaaaaaaaaaaggcctgcctcagaatatgtgtcatatatttgacaggatgaaaggattcaagtatatttaaatattgtctttttaattataggaaatggatatagatgaaatcttgaagagagctgaaactcatgaaaatgaaccaggtcctttaactgtaggagatgaattgctttcccagttcaaggtagatttaaacaaaattttccttgtaattacataaattgagaggaattgagttatgtcatttagtggtttgttaatctttctttaagcataatcaggaagattgctgtgttatgtaaaaactactctctcttgttcagacaaaccagtagcaaactgatttgaaagagaccaaacccatttatgaagttacatttagttgggtggaaagagctgttgtttcctaattagcaactagaatagtgtttggcaaatagcatgtccttaaatacttaggtaaataaatgaatcagtgtgatctcttacttagatttccatgactgaaagctttcagctgatatttttttgaagcagtttttgacattaacttatcacaaataagaaaactcaagtaaatcagtcaaagtaagcaataagctactatatattgatacttaatatccctggtttgttgagggtcaatgagttgaaaggagtcctaaaacaacgtaagtcaactgacctcatggagtaagttaagtgccatttgtttgaagaaacaggtttctctacatcttagctgttttctctgaactgtggtttttaaagatcaattcatttcatgtgttcatttgacaaatatttatggaacacctacagtgtaccccacacagtgaataaaaaacttttataattttaatgaatcattctgactactttgtggttgattgactgtagtgaggaaagagctatagcagggggagataagacagaatgttgagtaatcctggttaagaggtgaaggtttctggaatcacaggcgtgagccacttcgcccggctgtgatagttagccttaatgggtgctttctgtataccagaccttgcatagtaccttaaatgtgctatcttatgtaatcctcacagaaattagtgtgctctcaaagagctctatgtctctgccagtagctctttagatagtgtttttgtgaccataaaaatgatattagattgttctacaatacttgataggtggactggtctgagaatttctgcagattatttagcatgttaatagtataaattacttttttgttgttctgttaactgctcttagttctgtgatgctactaattttgttgagcagtagggcaaaataaaatcattcctagaggattattagatgtcatttggtttgatctgctttgccctaatgaagaaatgaatctaggttgtttagaagttatatttggtttagtccacagccatgttcattatcctaaggagcatgccagttcttccccttaaaaaaaacttttagggatcaatttttctgtaacagttactcttaaaattctgaaatttatcaggttgccaacttctcaaatatggatgaggatgacattgagttggaacctgaaagaaattcaaagaattgggaggaaattattccagaagatcaaagaagacgattagaagaagaagaaagacaaaaggaacttgaagaaatttatatgctcccaagaatgagaaattgtgcaaaacaggtgattttgcaattttaaagatatttctataaagtaagagtattcaacctgggctgattttgtttgtttctacgaggtatcagtccatagttttcttttcttgtaatggccttgatttgataatgtttgcctcatgaaatgagttgagaagtgtttcttcctcttttattcatcttttcaaagaacctgctcctggtttcattgatttttgtgtgtgtgtgtgtttttaatttcatgagtttccacaatttattatttcttcctttctgcttttgatttaatttgctgttttctttcttttcttttcttttttctttggtgacagcatcttgctctattgccaaggctggagtgcagtggcacaattctggctcactgcaaccttaacctcccggcctcagatgatcctcccacttcagcctcccaaatagctgggactacaggtgtgtcccaccacacccagctgatttttgtattctttttgtagagatggagttttaccatgttgtccaggctggtctggaacttctgggcttaagtgatccatctgccttggcctaccaaaatgttgggactatagcacgagccactgcacctggcctcttttattcagtttcttaaggtgcaagcttagatatagaaatgtaatctctcttttctaatatcggcatttaatgctacaaatttttctttaagcgttactttttctgaatcttccaaatctatttttatattttccttaatttaaaaacattttaaaatttcccatatgacttatctttgacccacaggtttttttagaagtatgttttaaaatgttcagatatttaggaaatttttcaactatgtttgttaatcattggtagtttaattctgtcatgttcagaaagcatattttatgtaattttaatttttaaaaatttgttggtgtttattcagtggcctaagtaaacaaataccaaaattttgaataactgtaatagtgccatgccaagctatattgccaaaaaggaaaaaaattctaagactaatttctttttctagtatcctttggtttttaggatataagattttttgtcttgattgctgagttttttcgtgcttccttaaattttaagcctggggcaaatgaggggcttgccccactctagtccctgccctgctaccattccccgaagggtagagctttttgttttttcttttcttgcaaccgtattagatcttattctgttccctcagttgagcagatgagaaaggtctggcaaggcttccttcctgtttccacaaaggtgactgctcactttctccaaggctgtaccatggaggaaagttttctccagtcttccttctcatgagcacctggtggaagttcgtggcaaagtgcttgagagtgggtgcaggtcctccgagttttggctgttaggtcctgtgatctcacaatagcgtacactcagccattagcagattttagctgatctcctcttacctgcttgtatggtacttgatttctgtcacctgtgttcttcacaaatgagccactgttcaagtcctctttttctctttttgtaatctcctgtatatccttacatttagatgtgtaggttgccgtgtgatttcatctctctgatgttaaacagaaaaattatgattttgtacatcagatttgttgttagagtaggagcagtgcccctaccaagtttctacataacagccagaagtagagccaaaaataatgcttttggcctgaaagtaaccatgcatgttatttcttgtttctgtttatttctccaaacccctaagtagttttgttttagagtgtgtgagaatgcagcattgcattagatcttgtgaaaggatcaagggaggttagaaaaaaaaggtctaaataccattttttacttcatttaactttcagcatattagaggttcggaatatgtgccaaggctttggaaaaactcccaagacttacagaatatatgttttgatgtatcttattaaaattaatggatgttacaaatagccttttatgtgggttcaactggcatttttttctttcaaatatctgatttgtctagttagaatagcaatatgtggatattaagcagaacggaaaaaaagacagctaatcaatctgttcatccagagataggactgataacattatcacagtgtacatcattctaatttttaaaaattcattatcatttgccaaattaagttggagttgtattaatttggaactttttcttctttttgacagtatgtcatgaatgttaattattctacaaccccatttttaatggtgtctcagcattctatcgtatagatttgtctggtctctctttgatgaatatttagattatttgctttttgtttttgagacaggatctcactgtgttgctcaggctgaaatgccatggtatggtcatggctcactgcagcctcagcttcctggggtcaaatgatcctcccacctcagcctctcatgtagctggaactacgggtgcatgctacaaaaatacctggctaatattttaaatttttggtagagacaaggtctcactatgttgcctaagctggtcttgaactcctgggctcaagttatcttcctgccttggcctcccagtcatgctgggattacaggcatgagctgctgcactcagccacatttttcttttatgatgtaaattactttattgatcaatgtttcttcacagttctgatctcctcaggaaaaatgcctagaggttatgttgctgcgtcagtagaataacttttggaggcttttgatataatgtctgattaccttttaaatcaaaatatccaccagaggtatatatttttctctgtttgctctttaattttgtttatggaatgtttttgatacatttaataacatttttaagattccgaccatcttttataatggtttttgctcttaagatacaagctgtttttacactaaggttgggtaaatattttccaattccagattagtttcaatggaagtgaagggaggcgcagtagaagtaggagatactctggatctgatagtgattccatctcagaagggaaaaggccaaagaaacgtggaagaccacggactattcctcgggagaatattaaaggatttagtgatgcagaaattaggcggtaaggtgttataagacaatcgcttcaacttggttttagtagagtgtgaaactaaaatgtaaaaacgccgtaattttcaaaaattgtgatgaagttttagaagaggcaaatctgttatttgagtaggaattgggtggttctgcttttgggtatttgttataactgaacaaaacaagtttggtgtctaatctttgcatgttatttatttatcgctaaactgcttagactacacaattttttttattaatttgactcaatagtgatcctttcgaataataaaagtagttttgatgcatttgatttttaaaaattctcacggtgtttatgactcccaaagttactaattttttgtggaaattctgtatttttctagtttcttaacaacagggtaatttcctttttgaaagtaaccctgttaaaagcatttctgatatgttcaagtaggaattgagatgaggtaagattggccaggcaggatatatttattgtagtgtccattcagaatatgtttatatatacacatttatttaagaggaatgggataacagcttacttttgtttatgtaatagttttggatatgacatttattaaaatcttattcagttttgtattttgaaagtttctttgaagccattgtaacttttttcttttaaaatcttagacctgacaaaattcttccttattctttctaccagaaaatttaatacattgttagtctttttaaaaggcactttcatgaccacctgaattgctgtacttttcgtctttagttgaggaagcatttcgacttctactttacctggatatttttcctcatttattaaccacttacgtagctttcttaagtaaaattttaattttgcattgttggtgtaatacacatctgaattaaagctattcagtgaatttttatcagcacttggaatgtgaggaagtgtaatataattgataattattgtggagacacttcctgtggtagcttcagaccttcttttggtcttatgaaaataatgaagtaatttttaaaacaaaatttagcttctattgttttatttatactgatatctaaacatcatcttggatgttaatttaccttgtcttacctggtgtatcttaatgttttaacatttttgtttttagcatagtttattcattcttcttagataacagtgccttgaatttttatactaacaagtattttcttatatctgtaaatatcagaaatacgtatatttttagtgaatactgaagctcacatttaccaaacaattattttctcttaggtttatcaagagctataagaaatttggtggtcctctggaaaggtaaatacgtttattattctcatagaataatggaatgtgttacatgctgtcacctttatttatttgtattaacattcagtttagctactttgttaaatttgcttttaatcggcatttacaaaattaatgtacaagggaaatttcagattgtttttaaaaatgtttttatactgtgtttaatttccagtctcaaatttctttcctgtaaattatctatacatgtttaaattgcacttttatgacggtaaggcactttttacaatctttatctcatttttcatcaataacttaaaagtagcacgagcagatttatccatagaggggctgagttgctaacccagccttttttttttttctttttaaatggagtctctcactgtctcccaggctggagtgcagtggcgcgatcttggctcactgtaacctccgcctcatgggttcatgtgatcctcctgcttcagcctctcgagcagctgggactacaggcgcatgccaccacacccagctaattttttttttttttttttttttttagtagagacggggtttcaccatattggccaggttggtctagaactcctgaattcaggtgatccgcctgcctcagcctcccaaaggctaacccagccttttaaccagctctgctttccctaagtagagatattttcttaagtttctcaaattcattctcttattatacaaactgtattaaaattcaaattaagatagtttttttgaagttatcagataatctcagtaattattgtgatttggatattctttgccctttgttgtggccaacccactgtctgaatatagatcagcaaagactcaaattagtttatttttttactcttaaaaaatcccttcaaaaatagatatattttgttttattttgagatggcatacttaaaatataatgaaatacttgcataattattttagatgaaaaaatgtcttgagtattaatcattcatattatctatttggtgcacagtaataaaaagttacagaactttactcagcttttgtgtttacaattataaagctttaccacttcattctgaacatcttaaaatttgatcagttattaaaaggttttacagaattggtatataatcttccatttgctctataatgaattaaactcattattattgaatatataaatgaattgtttgtctaccacattgtcctggtttttatgtgtttcctgccatttatgtgaacaagaatatatagagcatgcagtagagtgatattcagatcttgaaatagagtgaaacttaatcttaaatggcaccacttcatttaacatatttacctgaaaattggattattttgttacagattagatgcaattgctcgagatgctgagttagttgataagtcagaaacagaccttagacgactgggagaattggtacataatggttgcattaaagcattaaaggatagttcttcaggaacagaacgaacaggtaacattaaactgagagtgatttaaaagagaagtaaatgaaagcttcaaaatatgctttattgagctagatattatatcttaaattatttattcatcagtctcaaaaggttatttataaaacaaagtaaagctattctgggtaataggaaatggagaacagaattgcaattcgaaggcagtagaatctgtttttaattcccctgacattttctgtctgggaggtaaggtcagaaattactgttttatacacacacatatgtacattcatagatatatgtgtatatatacacacacacagtacaatatgtatagtatctataggttttttagtatagatgactgggaaaatataatgcaaatatacacatatgatattggtttgggacataattattttattattatgcttattttgctgttcatttacctgaataaaaattatttagataaaatttaataagcagaccaggcatagtggctcacacctgtaatcctagcacttttggaggctgagatgggagtttagcttgaacccaggagtttgagaccagcctgggcaacattgtgagaccctgtctctaagaaaaatgaaaacataaaaattagcagggtgtgattgtgcgtgcttgtagtctcagttacttgtgaattgaggtgggagggttgcttgagcccaggaggtcaagactgcagtgagcaatgattgcaccactgcacttccagcctgggcgacagagtgaaccctgagtcatcatcctataattctttatttagaggctgacggtattagtagattgatccatcttatgtaattggtaaaacacttagagaaatacttttcgtgaatttgcatctgcaagattataatcacttgttcatatgtaatgaagttcaaggttttccagtaatctcttaataatataaataaggaatacttattgttaaataacataagtaatagcatcagttgcttggtgttttgtagaattatgttttatacttttaaaaatactggtttttttaaaaaaaatcaaggtggtagactcggaaaagtgaagggtccaacattccgaatatcaggagtacaggtgaatgccaaactagtcatctcccatgaagaagaattaatacctttgcacaaatccattccttctgatccagaagaaagaaagcagtgagtgatttattttctccattgtaagatttttgttattcaataattgcaaaatgaatgtgctgaatttttatggtgttattggctagttttgaaaaaaaaaaggaagaaataaagcatattattttgaagttctaatgactcacgtttttcaaaattaatttttcagttaaggcaattacaaacttatcattagttattaactttgatgccaggtatactatcccatgccacacaaaggcagctcattttgatatagactggggcaaagaagatgattccaatttgttaattggcatctatgaatatggatatggaagctgggaaatgattaaaatggatcctgacctcagtctaacacacaaggtatttatctatttctgattctgttaaccattcatgttgaatttaatttattctaattcttgcttttaaattatgttggaaataatggaaatctggaaaccaaggcactagctggttgtgtgaccttggtgcgtttagaagatgctttgcatgaaaggatcaaatttaaatgatttctgagattttgcgttactgtgaaattatatgttattaaggcattaggtgtattatttttcaaattacgaggttaaaagtcttattccatcattagctttaaaaaaatttttgatgcataatagatgtacatatttttggatgcatgtgataatttgatacaatcatataatatataaagatgcaatcagggtaactggaacatttatcaccttaaatatttatctttaggaacatttaagtgattcttttctagctattttataatgtatagattattgctaactgtagtcaccctactcacctatcaaacactaggtcttatttcttccatctaactatatatttgtacccattcatcattaattttattattccagtaagacaaaatccttaaaatcttttatatttatttttaaaaaacatcggcattgtagtatttttggtcatttggttgcactgtgctagctgaaatccttttttttttttttttttttttttttttgcctaaaatgggaaacactgggagaacttccttattgtttatcctgtgtgttgggaacctttagatattggtgctttgtcatttgttactgtgaagaaaaaattaagtagtctagattcccctgtaaaactttcctcccagtgtatgctttaggtcttcttctagaaggatgacatcttgtagtctaggaatttctgtgtacattatatataagtacacttttactgagaagggaaggtgtttaaggattatataacatttaatagtggatgttaagtacacttttgtatatttgaaggaaatttacaaccttatgctttctattttcattttgaaagataatctgagggtttttgaagtttagaattcattctcagaaaaattaaatttttggctctggcatacgtataaaaaatacattttgcattgagtttattcctacaaatattaataattgaaacttgttggtgaactatatatatatttaaatggttaagcattttttagccagtacatttctcatgttatttattaagacaatctgaaaaaatttattgctttttcagattcttccagatgatcccgataaaaaaccacaagcaaaacagttgcagacccgtgcagactacctcatcaaattacttagtagagatcttgcaaaaaaagaagctctttctggtgcggtaagttaaagcccacatgcctaagaccagtttactttttagtaaggtaaattttgtttacttcaccatgctaaacatctgaagtcaatatgagcttatataaatggatttttctgtaattaagtagttttatttgatgttgccatatttaaattttaccttaaattatctcagcatacatgttaaaactgatgaatcatagctttcagaagtaggattctgttttttttttctagttttagagagggatagagaaaactcgtttagcgtgcggagtactttttgagaagtcaagccttacatagcctacatgactgttttacttggagtcattagaatgcttaagggacagcgtcataggttgccaagcttactgaaaaagaaggaaaaagacaccaaaaaggaggtgattggaaacttagagcaactgttagaagtttacctgtgaccataatgtcaataactacctgtgtagcgttaaaaatcattcctaatgcagtctcttgtgctatagaattaagctgaaggccataataatctcagagggtaaaaaatttgtttctacttctctctgatcctttttttaaaggaataataatggctagtatttattatttacattaatattatatttgactcattaagttatatcacctttattgagtttctgatgttggtacagcttattaccaatagactaaggatcaggtaggaatatgtgttctagcccttggatttaatgtttatgaagtttttaaaaatgaaatctgtagaattggttaaaattaaaataatgatttttagggaagttcaaagaggagaaaagcaagagctaagaagaataaagcaatgaagtctataaaagtgaaagaggaaataaagagtgattcttctcctctgccttcagagaagtctgatgaagatgatgataaagtaagaatgtgttttagaacaacaaccttttctatggaaagggaatatggcatgtttttgtgtactttacatttaaaatttatattttaggtaccgaagtctgtgtgtgtgtgtgtgtgtgtgtgtgtgtgcgcacgtgcgcacgcacttatagttcataacagtctcaattatagaacagaattctaactgtccagtagatattatatagcactagaggcatagagcaaaggtccttccttttcaaacatttgccaatttgatgagcttctgtctcttttaattgtattatgaacttgaatgggactggcttactttagtttataggaaggtaaacattgcatgtatcattattagggggattctgggctctttcagaatccacatacatgcaatctgtagtcatatgaagaaaaattagtcgttgttaaaatttggttagtaatacattggccatacttgcactttccaggatgagatcagttctgtgaaacatccaaataaaaaaattaaaacagaaagagacagtgaagaaaaacctgagccagatgtttatataaagaaggaaccagaagaaaagagggaagcaaaagaaaaggagaataaaaaagaacttaaaagggagataaaagaaaaagaggataagaaagatataaaggaaaaagattttaaagaaaaaagagaaaacaaagtaaaagaagctatacagaaagaaaaagacataaaggaagaaaaggtatgcaaatcataataaaaaatgtagaaagtaaaaacaatcagcatatttacattttaggagactaaattgcatatcagcccttattagtctcaataactgagttcttcagaagcatgtttgggtatgcagtagaggagaatagtaggtctgaacactctttaatgctttaccttcagagtaacattacagagtagctttgattgtttccccaaataaaattggggaaaaaaacaaattaaaatagatgaggatattcaatgagaatgagcacttgtagaataaaatgagacagtaattattttctggaagtgttagtcattttgcctttgttgctattggggttttgtttttgttttcttttcactttttctttagttgagtgaatccaagtctgatggtagggaaagatccaagaaatcttcagtgtcagatgctccagttcatatcacggcaagtggtgaaccagttcccatttctgaagaatctgaagagctggatcagaagacattcagcattgtaagccttagactttctgattattagtattaactcataaaacatttaagttgaagtttgtcatttatagcatttaatttagaactgcatttgaatttattgtagattgataaaagcaatgtatttgaaatttgaagggtgtcttttttttttttttttttttcttttttgagttagcatctcactgtcgcccaggctggagttcagtggtgcagtcacggcccattgcggcttcaacctcctgggctcaagtgcccctcctgcctcagcctctcgagtagctgggactagaggcatgtgccatatacccagctaatttttagttttttgtaaagatggggattttttatgtcacccaggctggtctcgaactccttggcgtaaaagggagataagcctgggcatggtggctcacacctgtaaacccagcactttggaaggccgaggcagtggatcacctgaggttaggagtttgagaccaacctggccaacatggtgacactctactaagaaaaaaaacaaaaattaactgggtgtgttggcgagcacctgtaatctcagctactcgggaggctgaggcaggagaattgctggaacctggaaggctgaggttgctgtgagctgagattgcaccattgcactccagcccgggccgacaacagtgagactctatctcaaaaaaaaaaaaaaaaaaaaaaacaaggaagataaaaggaggccaaggtgggcccaggtgctgggattacaggcatgagctatcgcacccagctggtgtcttaaatttagaagcaactcggaaagactttttaataaagacttttaagaagaggggtttaacaagtactttgagtgaatttgttttcctccagctcgtatttcaaatttttaaattcccaatgccattaaaaaataaatatgtacacacacacacacacatgtgtaatagtgcttcttatttatggtgaaggactagtttttttcccagttttttgcagaccaatatattttttaaaaaatacaagaagaatgaaatgtttcactagaaaagtgaaataagaaaaaattatgtacaaaatatgagcctaatgttttgttagtagatgcagtagctataaagttgcattgtcaaattatgagtttctaaacaggctcagtttttgtaccgatgttgttttggactggcaatatctcttgtcaaatatactgattctccatgttgtcatgcctttgcgttcctcaaagtgagggagaaactatctgtgcctttattctaaagaccttatttactgaagataattataatttatgtatttatttataatttactcaatgtatgtattcataatttatttactgaatataattatatacttatgtaattacataatataacagtatgtatgtgcttaatagtactgactcttgaggcagaatgctatttggtaagtaagtatgaagattaaatgaattggtacatgtaaagtttacagatcagtgctgtcttcagaaaagctcagaaatcgataagtgattgttgtagatgttgttcctaaattcagacatgtgaagcagataagagtgagactaaaaagtccaattgcagagcaaaaccaggaagaaataataatgttagagaaaaaagggctgagtgatacgagaccgataatgtagtttggctttaactaggactaggaaatgtttccttacaagccacaactgaaggaaacacttatagtctgatatatagatgtgtcatgtttatatatagttacaatatacacaaatttatatataaatatatattcctatatttcctttttagagatttctagcatctgaatcttttatactagttggagcagttaacatacttcagtcacttgttagacttgggtgtcagctttatcactagtattaatcaaatgctatacttcaaagagggaaaatttcaccttctaaaattatatttgttttcaacccattatgtccttctagatccccagcttatcctcttgtcctactttctcttcttttgcaccgtgactagacagtgttgatttaatgaacccactaatgtatttcctactgattccacaacatgccctaatatagttcaactattgttcatgctctttaaatatattggttttttaccatcctcttgttctccctactttgagctgttgacattcttccagtcactgggagtattggagacattcaaagctgctgcagctcctatcttccattttatttatttgagccatattttttatctctggacttttatttttatctcctgcaggttcacaggctggaatttcttctctctttttcaagggtaaccgtttttgtttttgttttttgtttttgtttttgttttttacctactctgtattgggtgggagtcaggggaggtggtattctttagcttttttgaagtgaaaacattaaacttttcactggagctacttccccttctctatgtggtctactaatgaattaggtgaaattgtatctcttgccacttttttttcccccacatttcttttttaatcttcggactttttcatgtaactgctggaatggaaaaattcctgctgtgcacaatgcatgaatttcctctccattaatcttaaatgatattgtgtgtatcatggaaatgaagactggaatagttcttaaacgtggactctgtagccagactttctggcctgtataggattttacctctaagtaaggaattccattgtatttgggaatagctctaagtaattatgaaattcaatggccttttctaggtcgtcactctctaaacatatttgcttcatttggcaccttgattttccttttactggttgtcttcctaaatgacagtataatttagcagtcaagaaagagcagagtctgaggtcagttagagctgggtttgacagatgtcattgtattctaagtttcagtttcttctataaaatagattaaatactattgcaaaggactattgtcagggtctgttcttattgcttccatcctactcatacctcagtttgtactccacatagcaaccagagtaatcatgacttagagggagaataaagtcacaccgttatatttctgtgcctacaacactccagtggctttccatctcatttaggagaaaagattcttagcctgaaaccagcctcgtagcatctagtcacctcccatcgttgccggccacttctctgacttacttggttccagcgacactggcattcatacttttttaaaaaacatgtcaaacaagttttaggactttcatgtttgttttttcctctacttggaatggcttgctccttcattttctttaggtgtcctctcaaacattgcccttctttgaaatcttgcttatgataagataggaagctccctgctctttcttcctttatttttctttatcacagttgttgtcatctgacatactatttcttgttcatttactggctctcttatactagagtccaggttccataaaggcaggatctgttttacttacagctctatttcctgcatctggaacaatgcctagaacatagtatgtactaaacttacatatgttggataaattattttctaacagaatataaactgccaaagttgaacaaaaaataggaaacataaaagcaatgaataaactaaaagttagaaaggaaattaaagattttccctttcttaaagcatcagatctgactgaattctaattttatttataataagagaggtccttcaaagcagtggtgtgaggatttattattttatttttttgaaatagggtctcacttttgcctaggctgcagtgccagtggcatgatcacagctcattacagtctcctgggttcaaacagtcctcccaccttgacctcctgagtagctgggactacaggtgtgcgccaccatgcttggctaattttttttttttttttttggtatagaatcaggatctcactgttgcccaggctgatctcaaactcctggactcaagtgatcctcccgcctcagcctcccaaagtgctggggttacaggcctgagccaccatgcctggcccaatttcttaataaatgatgttggattatctaaatgcattgtctgatgttgacccatcatccttatattcctagaactaaaccagcttgctttctgtgaatatgatgttaaatttttatttgtttttgcatttacaaattttatctgacggttgccttgttagtaatatttttattctgattttggcataaggttatagtgcctattgctacaataaaacatgcaattcttaatatgtcatccttttattagcatgtcaggaatgtacaggccaaggaaaaagttaccctttgaccctctactccccaaccacccaaaatatgaagagcaagccattattgccaccttctgttatcacaaaggtttggaagaatacagtttatatatctagctatattgattttaatagttttgctaaaatcattttaccctgtatttagtggatagtagggtattaagttatactctgaaatattttactatcttttaatagtctatatttaagactccttagaatagtgtgctacaatataaaaaataaccatttttgtagaagctaagtaaaatccaaaacttttacttactcaaagactgattttaaatgataacagaaaggcttgctctcctgaagaaaatctaaaggggaaagaaccctgatgtataagatttgtgaagtgagatttaattgcttattttgctatcaaacagtgttataatattatactcatgtaaatatcattgaaggaggtagaccttgttgaatttaggtttttaatacatgtgtttatattcttgttttctcattttaaagtgtaaagaaagaatgaggcctgttaaagcagctttgaaacaacttgataggcctgagaaaggcctttcagaaagagaacaactagagcatactagacaatgtttaataaaaattggagaccatatcacagaatgtctaaaagagtatacaaatcctgaacaaattaagcaatggagaaagtaagtgatacacttttcaggaagtgttaaatttatattatataactgtcttttttttttttgttttctttcctgattctgaagtttaggtaacaagataatttttaaagaggtaacctacagatgattgttttaatttttctccctttaatgttaaatttttttatttatgagtggttacttatgtatcatggtatgtaacaagtggcatctctgcctttaaagaaatagtgaaagctgtttcattaaaattcagattgcattttatttgaaaaagtctttgcaatttaccaaattattatcagtaatatcttttgaagttggtgttcccacaaagtttattgttgcttgaatttagcaatttacctcctggatacatgtataaagatgtaaaaattaacatcctcacgcaatgtaaaatgcaaaaaattaggaaaataaaggtaatgtagtgcaaattgttcttaaagctaaatttagctaatctaaaggattatattaaaattcttctctacttttattagtgtaaaaatgcttggcttctatcttttacatttaactggaactataaaatttgaaagcctggcaacttctcttttaaataatgccttttgccaagaatgggttatcattttggaggaccactgaatgaaaatacttagttgtatcttcaccaattttttgaatccttataattagggcttagatttttgaggttcaaagagttagaatgtctaccttttctgctttctagatgagaaataaggaacatcttattgaaattacacagtgaatttggttgaaagtaaatttaaaaatgagcaaagaattaaagaatttgaaataaaattttaagtaaaataaaaaaagttacacagtgactaatacaaataggtaccatttcaaattcggtttgttataaggaaagggtggggaaacctttggaagaagagagactaatagccaggagacttaactttttcattgtgttctgtcactttacatcctaaggctgtgctctcacctcacttttctttactcagttgggcagattacctttttggttttcccctgtttggttctcagttactttgatttcatattccttattgttcattcctgctgccactctctctggttaaaccaaattcccttaagggggagatggggaaggaaagagggaaatatcccataaagcaaaatagcttttgctgtcttggagaaattttattttgatttatttatttttttgagatggaatcttactctgttgcccaggttggagtgcagtggcgaatctcagctcgctgcatcctccgcctcctgggctcaagctatccttccacctcagtctctttggtagctgggactacaggcccacgctaccaggcctggctaattcttgtattttttgtagagatggggtttcaccatgtcagccaggctggtgttgaactcctgacctcaaggaatctgcctgccttggcctcccaaagtgctggggggaattttttttttatttttaatgcagaaacaagaaaaaaaagtaccttatattaagacctatcattggctgacccgatcccctcaagaacagtcattgtgggctgggcacaatggctcatgcctataatcccagcacgttgggaggccaaggtgggcgcatcacaaggtcaggagattgagaccatcctggctaagacggtggtctactaaaaatacaaaaaaaaaaaaaaaagtagtcgggcatggtggcatgtgcctgtagaaccagctactcaggaggctgaggcaagagaatcgcttgaacccaggaggtagaggtcgcagctattttgctttaagggatatttccctttctttcctgaatgaaagaagatagagatctaaaccacaattacagaacagttggcattaagcaagtgttacagtagttaccataatgatctttttgttttttgcttacaatttttttcaatatattttttgaccaaatttcttaaaaacaactgaaatgcaagactagtttttatttaaagatgactgtaataaagtgatggccaaaatagaatgtatatttgtattttgtcttattaaatatgcctcattctagctgatccttttaatagtattgtagaaaatgtgaacagatatttactattccattttacagaagaaaaaaatggattcagatgaaaagcattttagggctgggactggagaatgacaaaggaaacacctaggacctgaactgtttaaaagaggcactaattcttaggtttgtgtaagtgctgacgcttgcctcagctctggtgctttgttcaagatcagacagtcattcggatgatataattaagaccagaatctgattcctgactagattttttggggggaaaatatatttttataaggaatttacttaggaacaaaaaggtactttattaacttcctaccttttacccttataagttaatcgtagaatgtagatatgttcgagatagtctgtgaatttatataaaggctagatgaattttccttcttctgtggatttcatttcagtaaggtatcattcaatatattctcaaagttcattttaaaaatatatttcaaggtaaatattatacctctagtgtatatttgaatcttctagggatactaccctaacttagaacctaacattccttttctttttggaggtatatttgacaattacagttccttatatatttaaggtatacaatttgatgatttgatatacacatgcattgtgaaataattacagtctctgattaattactgatgcctcccttgggatgggaagagatagcaaactgtacctcatttatggtgtttggttgtgttactcttgggaccattacattaccattattaagtgacagttaactttttaatgcattatttaagacaattctttacaagcataattcatattatctgatggtatttccactccagttattaacatacctgtcccttatatgcataatcaggatcacaatatgaatctgagtcacttcctgatttaatttatgtctttggtgcatttcaaattaggattgtactgcttttcaccctaaagactataaaatgaagcgatttggaagagaagtaaaatttaatgtttagtttcactggagtcttagtcatatatgaagttttgaaaaaatgcataggaaaattaatatccttaagagtttgttccatagagggctgtgtatgtgtatatgtgtttgtgcctggagggaaggagttccatgaaaaaaactaaatattttccaccagactaacttaatttgcctttttttaaattcttctagaaacctgtggatttttgtatctaagtttactgaatttgatgcaagaaaattacataaattatataagcatgctattaaaaaacggcaggagtctcaggtaaacttgacatcatattttttccctgaatttatataattaaaaccttgagacattctttttacagagcagtttgattaataaatacagaatgaataagataaatttaaaaaatcaccattgaacaccacagtaatgattgttgcaggcgagattcacagaagagaggtaaaattaatgggcaagaaaacaggatattggcagatctcctctgaaatgtttattagttataaagggaaaataataactttatagagaaacttgcctgacccaccttaaacaagtgatcaaagttaatgtcaccaatagttaagacatatcagcatcatgaaccctctgatactgagaaaggtacatcacttatgtggaattcttgccaaaaatatatgtgttattatgtgaaaatatcagacaagccctacttgacggatattctataaaataactgtctgctactcttctaaagtgttaagagcatgcagtagactaaggagctgtcccagaggaagacgtgacaactaagtgtaatatgggcttccaaatcgaatccccgagcagataaagaacattagtggaaaaatgtgaaatctgaatgaagtctgttcttcaattaatagtgttataccaatgttaattatttggttttgatcattatactatgtttgtataagatattaacattaggagaagctagatgaagggaactcagtatttttgcaacctttctgttaagtcaatttatttcaaaatgaaaaaatatctttaagtcatgggacaagtagttcatactttaaaaatggagatctataaatgtcatacatgtatatatacacacataaacattctaatatcttgtgtgaagacttcattatcagtattttctaagaattatctctgcttttttgtaagtttgtgaagtcacctaaagattcttaacacgtgtgcatttattttagcaaaacagtgatcaaaacagcaacttgaatcctcacgtgattagaaatccaggtatgtaagccttactgattgggaaaataaattaaaaaaaattttttttaaatttttgttttaaataaaccaaatgataaaaaaggttcttaccttgtttttatttataagtacctttatattaaggagatacagtaattctgatacatacctacattattatgtaaaatgtattctcttaaactgtagttcattttagtttattatccttttaatcatccttttctcagtttctagaaattgtagaatgactgttaaaatgaacaaatattcttttttatgtaatttggaatagtaatgcattctttctgtatcagagtcacaaaagtatagtctgagaaaggaataggtcccatattttttagtttttgtgacatttcagaatcaagcaaccttttttaattaatccttagtactgcttttatacaccatttctaaatgctttaactgcttgtatttgggaaccgattttgttttggcaagggttgaaacgaattcttgttatctatcaactaagttttttttgccacattatttttaaggtcattaataaaagttgtacttatctaacagatgtggaaagattaaaagagaatacaaatcacgatgatagcagcagggacagttattcctctgatagacacttaactcagtaccatgatcatcataaagaccgacatcagggagattcttacaaaaaaagtgattccaggaaaagaccctattcttcttttagtaatggtaaagaccatcgtgattgggatcactacaagcaagacagcaggtaaacttggcagtcactttagaaattttgcttatgcatgtttttctccttatcatgatgttcctgtatttgacctgtcagccaattcaatcttcatgcagtcaaaacaaatcttgtgaaataaaggtgttgtatataattaagaaaaatgtatatattttaagaactgaatttctctataaaatggattttgaattataaaattgagatcaaaatatgtagtaaggtgatgtagggagttgtatgattataaattgcgtggggttcattgttcgttttgaagaatattggctcaaatactctttaaaatataataagtgggataaaagcttgatataatagtgattcaggtttggtttaggaaattttgcattccatatttttaaaaagtcgggaaaaattaatatatgtgaacacatctcattgaggtaaaacttaacctcagcaatctggaatattattggaaccaggaaggttttttgtttattgttttttgaagcctttgaacagtaagcaacctcagtgtaataacatcagaatactttttattcctttattgataaagaagtattttcggtagttaatgatcactactaaaagtaaacttgaaaactgagatttatagtatttatgcttttatagtaagtagaagaaacaaattagaagacatctttgtattttagtgttcattacaataatttctttgagaacctctgtcagcactatgaacacatcagttgtagaatggctgttatttgaaggggtcaaataattaaaaggaaaaggcagatttatagtatatatttcacaggcttatgcaatatagttacagttgtgtgtgtgtcagtttggaaaaggcactcattttagagaataattctcattaaactgccacatttattttttatcaagctgtcacatgtttgtatggagtaaatttcgtaatgattcatgtgtcgagtcttactatataactagtcaaacttgaggaagcttttaataggcatcagcaaccagtgaaaaatttttcagcatagactgcattctagcatttttaaactttttcctgcttagaggttggtaaaaggctctggtctcaggagtatttcagatagttgtaataatcttaatttcagcttccagacaattaagatgcagtcatataaatgatgtgtaaaataaaaagcagctaattatctaaaatagccatgtgaaattagatgctattttaggggttttgtatggttcgctttagttttatgaatcaaatagtttttccaaagagatatatccagtgatttttgagttaattaagtaagttttataatgcaacactgagtttctatacaattaaaaacatgttttaaggtatttttatgttttttagttatcttttatttggaaacattttaatttgcatgatttgtctaaaattctcaatttttctttattagatattacagtgacagagagaaacacagaaaactggatgatcacaggagtagagatcacaggtcaaatttggaaggaagtttaaaagatagatctcattctgatcatcgttctcactcagatcatcggttacattcagaccaccggtcaagttctgaatatacgcaccataaatcttccagggattataggtatcactcagactggcaaatggaccacagagcttccagcagtggccctaggtcaccactagatcagagatctccttatggctccagatctccatttgaacattcagttgaacacaaaagtacaccggagcatacctggagtagtcggaaaacataacaaaaactgatacttcgtctttctggacttttcttttagccatatatcataaaccaacacagtaattgccttacatgacttgaaagatataaacagatcttctatcagtagcagtattgttacttctttccaggatgcaaggtctattatcccaacagaagagaaaatatttttatatttaaggattatgctgcactgtactacaaaattgtagtacttttttttgttttcttttttaaagaaatggaaaatgtttactattacagggacctcaacactgccctcccatacaggctggataaaactgtttttaagtcagtgattttagactgacctccatttaaattatgtttatatatgaactttactctgacctgtgatcatgtttcaggaaggaatgaaagagagttctttcttaataaagaaaaacactcaaggactttgttcatttccaaagctacttgtttacattgtacactgcgaccaccttgccgcttttcatcacaagcttgaatatttaaattctgtacttatatctgtaaaatagccaggaatttcctgtttgtgatctattatgcctttttacaaaaaaaatggctgtaaattattgtaaatattaaaggaactttccttacttccttccctttctcaggctttttttgactgttcctttccctaccaactcaggccttcttattaaaaaaaaaaaaatcagtgtaataacactttttaatgatttgtcttgatggaatcattgtttagaatgtaaaaatggggaaaggggccacttaattccattagtcctctttttatactgaatattttattagatacatgttattcccttttttttccttttttagtcaatattgtgtttgtagttttaaaaaatggcgagatatgtaaaatctaaactgcatgctctggaaacacttttttcagatgcatctggtttaaaagggtaggtgtataaacacttttcagaatccaaaacggccaaaagttattgtaaatccgtttgttttcccgttttatgtgggcaataatgtcaaatgtgctatgcagccaggttaacattttagataaacttgattgacttttaatataaactgttacaatgcacactgattgtatataaaaacgttatatatgacaaattaaatttaagaaaaaggatatgtgggctcctgtaattttctgctgcattcttactccctcaagcacttaccaccaccaccaccgccccctacccccgtttttaagtaacattttgctgccagaaaaagtattttggtaagcagttgaatatttgtaatgtgtagcattacaactaaatctgttttggagactatgaatattcctatgaagtaaaacttaggtcatagacatttttgttggccccttttggcttcctacagatattattatgggatgctttatatttattcacagat

SEQ ID NO: 51 - DNA, 4931 bp, Homo sapiens
aggtgaatcaaaggagagtcccagaaaacctgtgactgttgaagaaaattcatctgtgaatttttatattcaaggagtcagtatttatattcatcttttaaactgggaagatttatattttactttaaaacttcttgataataatttacaatgaatggacacagtgatgaagaaagtgttagaaacagtagtggagaatcaagccagtcggatgatgattctgggtcagcttcaggctctggatctggttcgagttctggaagcagtagtgatggaagcagtagccagtcaggtagcagtgactctgactccggatctgaatcaggcagtcagtcagagtctgagtcagacacttcccgagaaaacaaagttcaagcaaaaccaccgaaagttgatggagctgagttttggaaatctagtcctagtattctggccgttcagagatctgcaatcctcaagaagcagcaacagcagcagcagcaacaacaacatcaagcctcatctaatagcggatcagaagaggattcctctagcagtgaagattccgatgactcatcaagtgaggtcaaaaggaaaaagcataaagatgaagattggcaaatgtctgggtcaggatctccatctcagtctggttcagattcagaatctgaagaagagagagagaaaagcagttgtgatgaaacagaatctgattatgagccaaaaaacaaagtcaaaagcagaaaacctcaaaatagatctaagtcaaaaaatggaaagaagattcttggacaaaaaaagagacagattgattcatctgaggaggatgatgatgaagaagattatgataatgataaaagaagttctcgtcgccaagcaactgttaatgttagctataaggaggatgaagaaatgaaaacagattctgatgacctactggaagtctgtggagaggatgttcctcaacctgaggaagaggaatttgaaaccatagaaagatttatggattgtcggattgggagaaaaggagctactggtgctactacaaccatctatgcagttgaagcagatggtgacccaaatgcaggctttgaaaaaaacaaagaaccaggagagattcagtatttaattaaatggaaaggatggtcccatatccacaacacttgggagacagaagaaaccctcaagcagcagaatgttagaggaatgaaaaaattggataattataagaaaaaagatcaggaaacaaaaagatggttgaaaaatgcctctccagaagatgtggaatattataattgccagcaagaacttacagatgatctacataaacagtatcaaatagtggaacgtataattgctcattccaatcaaaagtcagcagctggttatcctgattattactgcaaatggcagggccttccatactcagagtgcagctgggaagatggagctctcatttccaaaaagtttcaagcatgcattgatgagtattttagcaggaaccaatcaaaaaccactccttttaaagattgcaaagtattaaaacaaaggccaaggtttgtagccctgaagaagcagccatcctatattggaggacatgagggcttagaattaagagattatcaactgaatggtttaaattggcttgctcattcttggtgcaaaggaaatagttgcatactcgctgatgaaatgggccttggaaaaacaatacagacgatctcatttctgaattatttgtttcatgaacatcaattatatggaccttttttattggtagtaccgctctccactcttacttcctggcaaagggaaattcagacttgggcttctcaaatgaatgctgtggtttatttaggtgacattaacagcagaaacatgataagaactcatgaatggacgcatcatcagaccaaacggttaaaatttaatatattgttaacaacttatgaaattttattaaaagataaggcattccttggaggtctaaattgggcatttataggtgttgatgaagcacaccgattaaagaatgatgactcccttctgtataaaactttaatagattttaaatccaatcatcgtctccttatcactggaactcctctacagaattccctcaaagagctctggtctttgctacatttcattatgccagaaaagttttcttcctgggaagattttgaagaagaacatggcaaagggagagaatatggttatgcaagccttcacaaggagcttgagccatttctgttacgccgagttaagaaagatgtggaaaaatctcttcctgccaaggttgagcagattttaagaatggaaatgagtgctttacagaaacaatattacaaatggattttaactaggaattacaaagccctcagcaaaggttccaagggcagtacctcaggctttttgaacattatgatggagctaaagaaatgttgtaaccattgctacctcattaaaccaccagataataatgaattctataataaacaggaggccttacaacacttaattcgtagtagcggaaaattgattcttcttgacaagctattaattcgcctaagagaacgaggcaatcgagttcttattttttcacaaatggtgcggatgttagatatacttgcagaatatttgaaatatcgtcaattcccctttcaaagattagatggatcaataaaaggagaactgaggaaacaagctctagatcattttaatgctgagggatcagaggatttttgctttttgctgtccacaagagctggaggtctagggattaatttagcctctgctgacactgttgttatatttgattccgattggaatccacagaatgatcttcaggcacaggctagagcccatcgaattgggcaaaagaaacaggtgaatatttatcgtctagttacaaagggatcagttgaagaagatattcttgaaagggcgaaaaagaagatggttttagatcatcttgtaattcaaagaatggacacaactgggaagacagtactacatacaggttctgccccatcaagttctactcctttcaataaagaagagttatcagccattttaaagtttggtgctgaagaactttttaaggaacctgaaggagaagaacaagagccccaggaaatggatatagatgaaatcttgaagagagctgaaactcatgaaaatgaaccaggtcctttaactgtaggagatgaattgctttcccagttcaaggttgccaacttctcaaatatggatgaggatgacattgagttggaacctgaaagaaattcaaagaattgggaggaaattattccagaagatcaaagaagacgattagaagaagaagaaagacaaaaggaacttgaagaaatttatatgctcccaagaatgagaaattgtgcaaaacagattagtttcaatggaagtgaagggaggcgcagtagaagtaggagatactctggatctgatagtgattccatctcagaagggaaaaggccaaagaaacgtggaagaccacggactattcctcgggagaatattaaaggatttagtgatgcagaaattaggcggtttatcaagagctataagaaatttggtggtcctctggaaagattagatgcaattgctcgagatgctgagttagttgataagtcagaaacagaccttagacgactgggagaattggtacataatggttgcattaaagcattaaaggatagttcttcaggaacagaacgaacaggtggtagactcggaaaagtgaagggtccaacattccgaatatcaggagtacaggtgaatgccaaactagtcatctcccatgaagaagaattaatacctttgcacaaatccattccttctgatccagaagaaagaaagcagtatactatcccatgccacacaaaggcagctcattttgatatagactggggcaaagaagatgattccaatttgttaattggcatctatgaatatggatatggaagctgggaaatgattaaaatggatcctgacctcagtctaacacacaagattcttccagatgatcccgataaaaaaccacaagcaaaacagttgcagacccgtgcagactacctcatcaaattacttagtagagatcttgcaaaaaaagaagctctttctggtgcgggaagttcaaagaggagaaaagcaagagctaagaagaataaagcaatgaagtctataaaagtgaaagaggaaataaagagtgattcttctcctctgccttcagagaagtctgatgaagatgatgataaattgagtgaatccaagtctgatggtagggaaagatccaagaaatcttcagtgtcagatgctccagttcatatcacggcaagtggtgaaccagttcccatttctgaagaatctgaagagctggatcagaagacattcagcattaaacctgtggatttttgtatctaagtttactgaatttgatgcaagaaaattacataaattatataagcatgctattaaaaaacggcaggagtctcagcaaaacagtgatcaaaacagcaacttgaatcctcacgtgattagaaatccagatgtggaaagattaaaagagaatacaaatcacgatgatagcagcagggacagttattcctctgatagacacttaactcagtaccatgatcatcataaagaccgacatcagggagattcttacaaaaaaagtgattccaggaaaagaccctattcttcttttagtaatggtaaagaccatcgtgattgggatcactacaagcaagacagcagatattacagtgacagagagaaacacagaaaactggatgatcatgtttcaggaaggaatgaaagagagttctttcttaataaagaaaaacactcaaggactttgttcatttccaaagctacttgtttacattgtacactgcgaccaccttgccgcttttcatcacaagcttgaa

SEQ ID NO: 52 - protein, 1413 aa, Homo sapiens
MNGHSDEESVRNSSGESSQSDDDSGSASGSGSGSSSGSSSDGSSSQSGSSDSDSGSESGSQSESESDTSRENKVQAKPPKVDGAEFWKSSPSILAVQRSAILKKQQQQQQQQQHQASSNSGSEEDSSSSEDSDDSSSEVKRKKHKDEDWQMSGSGSPSQSGSDSESEEEREKSSCDETESDYEPKNKVKSRKPQNRSKSKNGKKILGQKKRQIDSSEEDDDEEDYDNDKRSSRRQATVNVSYKEDEEMKTDSDDLLEVCGEDVPQPEEEEFETIERFMDCRIGRKGATGATTTIYAVEADGDPNAGFEKNKEPGEIQYLIKWKGWSHIHNTWETEETLKQQNVRGMKKLDNYKKKDQETKRWLKNDEDVEYYNCQQELTDDLHKQYQIVERIIAHSNQKSAAGYPDYYCKWQGLPYSECSWEDGALISKKFQACIDEYFSRNQSKTTPFKDCKVLKQRPRFVKKQPSYIGGHEGLELRDYQLNQWLAHSWCKGNSCILADEMGLGKTIQTISFLNYLFHEHQLYGPFLLVVPLSTLTSWQREIQTWASQMNAVVYLGDINSRNMIRTHEWTHHQTKRLKFNILLTTYEILLKDKAFLGQWAFIGVDEAHRLKNDDSLLYKTLIDFKSNHRLLITGTPLQNSLKELWSLLHFIMPEKFSSWEDFEEEHGKGREYGYASLHKELEPFLLRRVKKDVEKSLPAKVEQILRMEMSALQKQYYKWILTRNYKALSKGSKGSTSGFLNIMMELKKCCNHCYLIKPPDNNEFYNKQEALQHLIRSSGKLILLDKLLIRLRERGNRVLIFSQMVRMLDILAEYLKYRQFPFQRLDGSIKGELRKQALDHFNAEGSEDFCFLLSTRAGGLGINLASADTVVIFDSDWNPQNDLQAQARAHRIGQKKQVNIYRLVTKGSVEEDIRAKKKMVLDHLVIQRMDTTGKTVLHTGSAPSSSTPFNKEELSAILKFGAEELFKEPEGEEQEPQEMDIDEILKRAETHENEPGPLTVGDELLSQFKVANFSNMDEDDIELEPERNSKNWEEIIPEDQRRRLEEEERQKELEEIYMLPRMRNCAKQISFNGSEGRRSRSRRYSGSDSDSISEGKRPKKRGRPRTIPRENIKGFSDAEIRRFIKSYKKFGGPLERLDAIARDAELVDKSETDLRRLGELVHNGCIKALKDSSSGTERTGGRLGKVKGPTFRISGVQVNAKLVISHEEELIPLHKSIPSDPEERKQYTIPCHTKAAHFDIDWGKEDDSNLLIGIYEYGYGSWEMIKMDPDLSLTHKILPDDPDKKPQAKQLQTRADYLIKLLSRDLAKKEALSGAGSSKRRKARAKKNKAMKSIKVKEEIKSDSSPLPSEKSDEDDDKLSESKSDGRERSKKSSVSDAPVHITASGEPVPISEESEELDQKTFSIKPVDFCI

SEQ ID NO: 53 - DNA, 6737 bp, Homo sapiens
aggtgaatcaaaggagagtcccagaaaacctgtgactgttgaagaaaattcatctgtgaatttttatattcaaggagtcagtatttatattcatcttttaaactgggaagatttatattttactttaaaacttcttgataataatttacaatgaatggacacagtgatgaagaaagtgttagaaacagtagtggagaatcaagccagtcggatgatgattctgggtcagcttcaggctctggatctggttcgagttctggaagcagtagtgatggaagcagtagccagtcaggtagcagtgactctgactccggatctgaatcaggcagtcagtcagagtctgagtcagacacttcccgagaaaacaaagttcaagcaaaaccaccgaaagttgatggagctgagttttggaaatctagtcctagtattctggccgttcagagatctgcaatcctcaagaagcagcaacagcagcagcagcaacaacaacatcaagcctcatctaatagcggatcagaagaggattcctctagcagtgaagattccgatgactcatcaagtgaggtcaaaaggaaaaagcataaagatgaagattggcaaatgtctgggtcaggatctccatctcagtctggttcagattcagaatctgaagaagagagagagaaaagcagttgtgatgaaacagaatctgattatgagccaaaaaacaaagtcaaaagcagaaaacctcaaaatagatctaagtcaaaaaatggaaagaagattcttggacaaaaaaagagacagattgattcatctgaggaggatgatgatgaagaagattatgataatgataaaagaagttctcgtcgccaagcaactgttaatgttagctataaggaggatgaagaaatgaaaacagattctgatgacctactggaagtctgtggagaggatgttcctcaacctgaggaagaggaatttgaaaccatagaaagatttatggattgtcggattgggagaaaaggagctactggtgctactacaaccatctatgcagttgaagcagatggtgacccaaatgcaggctttgaaaaaaacaaagaaccaggagagattcagtatttaattaaatggaaaggatggtcccatatccacaacacttgggagacagaagaaaccctcaagcagcagaatgttagaggaatgaaaaaattggataattataagaaaaaagatcaggaaacaaaaagatggttgaaaaatgcctctccagaagatgtggaatattataattgccagcaagaacttacagatgatctacataaacagtatcaaatagtggaacgtataattgctcattccaatcaaaagtcagcagctggttatcctgattattactgcaaatggcagggccttccatactcagagtgcagctgggaagatggagctctcatttccaaaaagtttcaagcatgcattgatgagtattttagcaggaaccaatcaaaaaccactccttttaaagattgcaaagtattaaaacaaaggccaaggtttgtagccctgaagaagcagccatcctatattggaggacatgagggcttagaattaagagattatcaactgaatggtttaaattggcttgctcattcttggtgcaaaggaaatagttgcatactcgctgatgaaatgggccttggaaaaacaatacagacgatctcatttctgaattatttgtttcatgaacatcaattatatggaccttttttattggtagtaccgctctccactcttacttcctggcaaagggaaattcagacttgggcttctcaaatgaatgctgtggtttatttaggtgacattaacagcagaaacatgataagaactcatgaatggacgcatcatcagaccaaacggttaaaatttaatatattgttaacaacttatgaaattttattaaaagataaggcattccttggaggtctaaattgggcatttataggtgttgatgaagcacaccgattaaagaatgatgactcccttctgtataaaactttaatagattttaaatccaatcatcgtctccttatcactggaactcctctacagaattccctcaaagagctctggtctttgctacatttcattatgccagaaaagttttcttcctgggaagattttgaagaagaacatggcaaagggagagaatatggttatgcaagccttcacaaggagcttgagccatttctgttacgccgagttaagaaagatgtggaaaaatctcttcctgccaaggttgagcagattttaagaatggaaatgagtgctttacagaaacaatattacaaatggattttaactaggaattacaaagccctcagcaaaggttccaagggcagtacctcaggctttttgaacattatgatggagctaaagaaatgttgtaaccattgctacctcattaaaccaccagataataatgaattctataataaacaggaggccttacaacacttaattcgtagtagcggaaaattgattcttcttgacaagctattaattcgcctaagagaacgaggcaatcgagttcttattttttcacaaatggtgcggatgttagatatacttgcagaatatttgaaatatcgtcaattcccctttcaaagattagatggatcaataaaaggagaactgaggaaacaagctctagatcattttaatgctgagggatcagaggatttttgctttttgctgtccacaagagctggaggtctagggattaatttagcctctgctgacactgttgttatatttgattccgattggaatccacagaatgatcttcaggcacaggctagagcccatcgaattgggcaaaagaaacaggtgaatatttatcgtctagttacaaagggatcagttgaagaagatattcttgaaagggcgaaaaagaagatggttttagatcatcttgtaattcaaagaatggacacaactgggaagacagtactacatacaggttctgccccatcaagttctactcctttcaataaagaagagttatcagccattttaaagtttggtgctgaagaactttttaaggaacctgaaggagaagaacaagagccccaggaaatggatatagatgaaatcttgaagagagctgaaactcatgaaaatgaaccaggtcctttaactgtaggagatgaattgctttcccagttcaaggttgccaacttctcaaatatggatgaggatgacattgagttggaacctgaaagaaattcaaagaattgggaggaaattattccagaagatcaaagaagacgattagaagaagaagaaagacaaaaggaacttgaagaaatttatatgctcccaagaatgagaaattgtgcaaaacagattagtttcaatggaagtgaagggaggcgcagtagaagtaggagatactctggatctgatagtgattccatctcagaagggaaaaggccaaagaaacgtggaagaccacggactattcctcgggagaatattaaaggatttagtgatgcagaaattaggcggtttatcaagagctataagaaatttggtggtcctctggaaagattagatgcaattgctcgagatgctgagttagttgataagtcagaaacagaccttagacgactgggagaattggtacataatggttgcattaaagcattaaaggatagttcttcaggaacagaacgaacaggtggtagactcggaaaagtgaagggtccaacattccgaatatcaggagtacaggtgaatgccaaactagtcatctcccatgaagaagaattaatacctttgcacaaatccattccttctgatccagaagaaagaaagcagtatactatcccatgccacacaaaggcagctcattttgatatagactggggcaaagaagatgattccaatttgttaattggcatctatgaatatggatatggaagctgggaaatgattaaaatggatcctgacctcagtctaacacacaagattcttccagatgatcccgataaaaaaccacaagcaaaacagttgcagacccgtgcagactacctcatcaaattacttagtagagatcttgcaaaaaaagaagctctttctggtgcgggaagttcaaagaggagaaaagcaagagctaagaagaataaagcaatgaagtctataaaagtgaaagaggaaataaagagtgattcttctcctctgccttcagagaagtctgatgaagatgatgataaattgagtgaatccaagtctgatggtagggaaagatccaagaaatcttcagtgtcagatgctccagttcatatcacggcaagtggtgaaccagttcccatttctgaagaatctgaagagctggatcagaagacattcagcatttgtaaagaaagaatgaggcctgttaaagcagctttgaaacaacttgataggcctgagaaaggcctttcagaaagagaacaactagagcatactagacaatgtttaataaaaattggagaccatatcacagaatgtctaaaagagtatacaaatcctgaacaaattaagcaatggagaaaaaacctgtggatttttgtatctaagtttactgaatttgatgcaagaaaattacataaattatataagcatgctattaaaaaacggcaggagtctcagcaaaacagtgatcaaaacagcaacttgaatcctcacgtgattagaaatccagatgtggaaagattaaaagagaatacaaatcacgatgatagcagcagggacagttattcctctgatagacacttaactcagtaccatgatcatcataaagaccgacatcagggagattcttacaaaaaaagtgattccaggaaaagaccctattcttcttttagtaatggtaaagaccatcgtgattgggatcactacaagcaagacagcagatattacagtgacagagagaaacacagaaaactggatgatcacaggagtagagatcacaggtcaaatttggaaggaagtttaaaagatagatctcattctgatcatcgttctcactcagatcatcggttacattcagaccaccggtcaagttctgaatatacgcaccataaatcttccagggattataggtatcactcagactggcaaatggaccacagagcttccagcagtggccctaggtcaccactagatcagagatctccttatggctccagatctccatttgaacattcagttgaacacaaaagtacaccggagcatacctggagtagtcggaaaacataacaaaaactgatacttcgtctttctggacttttcttttagccatatatcataaaccaacacagtaattgccttacatgacttgaaagatataaacagatcttctatcagtagcagtattgttacttctttccaggatgcaaggtctattatcccaacagaagagaaaatatttttatatttaaggattatgctgcactgtactacaaaattgtagtacttttttttgttttcttttttaaagaaatggaaaatgtttactattacagggacctcaacactgccctcccatacaggctggataaaactgtttttaagtcagtgattttagactgacctccatttaaattatgtttatatatgaactttactctgacctgtgatcatgtttcaggaaggaatgaaagagagttctttcttaataaagaaaaacactcaaggactttgttcatttccaaagctacttgtttacattgtacactgcgaccaccttgccgcttttcatcacaagcttgaatatttaaattctgtacttatatctgtaaaatagccaggaatttcctgtttgtgatctattatgcctttttacaaaaaaaatggctgtaaattattgtaaatattaaaggaactttccttacttccttccctttctcaggctttttttgactgttcctttccctaccaactcaggccttcttattaaaaaaaaaaaaatcagtgtaataacactttttaatgatttgtcttgatggaatcattgtttagaatgtaaaaatggggaaaggggccacttaattccattagtcctctttttatactgaatattttattagatacatgttattcccttttttttccttttttagtcaatattgtgtttgtagttttaaaaaatggcgagatatgtaaaatctaaactgcatgctctggaaacacttttttcagatgcatctggtttaaaagggtaggtgtataaacacttttcagaatccaaaacggccaaaagttattgtaaatccgtttgttttcccgttttatgtgggcaataatgtcaaatgtgctatgcagccaggttaacattttagataaacttgattgacttttaatataaactgttacaatgcacactgattgtatataaaaacgttatatatgacaaattaaatttaagaaaaaggatatgtgggctcctgtaattttctgctgcattcttactccctcaagcacttaccaccaccaccaccgccccctacccccgtttttaagtaacattttgctgccagaaaaagtattttggtaagcagttgaatatttgtaatgtgtagcattacaactaaatctgttttggagactatgaatattcctatgaagtaaaacttaggtcatagacatttttgttggccccttttggcttcctacagatattattatgggatgctttatatttattcacagat

SEQ ID NO: 54 - protein, 1698 aa, Homo sapiens
MNGHSDEESVRNSSGESSQSDDDSGSASGSGSGSSSGSSSDGSSSQSGSSDSDSGSESGSQSESESDTSRENKVQAKPPKVDGAEFWKSSPSILAVQRSAILKKQQQQQQQQQHQASSNSGSEEDSSSSEDSDDSSSEVKRKKHKDEDWQMSGSGSPSQSGSDSESEEEREKSSCDETESDYEPKNKVKSRKPQNRSKSKNGKKILGQKKRQIDSSEEDDDEEDYDNDKRSSRRQATVNVSYKEDEEMKTDSDDLLEVCGEDVPQPEEEEFETIERFMDCRIGRKGATGATTTIYAVEADGDPNAGFEKNKEPGEIQYLIKWKGWSHIHNTWETEETLKQQNVRGMKKLDNYKKKDQETKRWLKNDEDVEYYNCQQELTDDLHKQYQIVERIIAHSNQKSAAGYPDYYCKWQGLPYSECSWEDGALISKKFQACIDEYFSRNQSKTTPFKDCKVLKQRPRFVKKQPSYIGGHEGLELRDYQLNQWLAHSWCKGNSCILADEMGLGKTIQTISFLNYLFHEHQLYGPFLLVVPLSTLTSWQREIQTWASQMNAVVYLGDINSRNMIRTHEWTHHQTKRLKFNILLTTYEILLKDKAFLGQWAFIGVDEAHRLKNDDSLLYKTLIDFKSNHRLLITGTPLQNSLKELWSLLHFIMPEKFSSWEDFEEEHGKGREYGYASLHKELEPFLLRRVKKDVEKSLPAKVEQILRMEMSALQKQYYKWILTRNYKALSKGSKGSTSGFLNIMMELKKCCNHCYLIKPPDNNEFYNKQEALQHLIRSSGKLILLDKLLIRLRERGNRVLIFSQMVRMLDILAEYLKYRQFPFQRLDGSIKGELRKQALDHFNAEGSEDFCFLLSTRAGGLGINLASADTVVIFDSDWNPQNDLQAQARAHRIGQKKQVNIYRLVTKGSVEEDIRAKKKMVLDHLVIQRMDTTGKTVLHTGSAPSSSTPFNKEELSAILKFGAEELFKEPEGEEQEPQEMDIDEILKRAETHENEPGPLTVGDELLSQFKVANFSNMDEDDIELEPERNSKNWEEIIPEDQRRRLEEEERQKELEEIYMLPRMRNCAKQISFNGSEGRRSRSRRYSGSDSDSISEGKRPKKRGRPRTIPRENIKGFSDAEIRRFIKSYKKFGGPLERLDAIARDAELVDKSETDLRRLGELVHNGCIKALKDSSSGTERTGGRLGKVKGPTFRISGVQVNAKLVISHEEELIPLHKSIPSDPEERKQYTIPCHTKAAHFDIDWGKEDDSNLLIGIYEYGYGSWEMIKMDPDLSLTHKILPDDPDKKPQAKQLQTRADYLIKLLSRDLAKKEALSGAGSSKRRKARAKKNKAMKSIKVKEEIKSDSSPLPSEKSDEDDDKLSESKSDGRERSKKSSVSDAPVHITASGEPVPISEESEELDQKTFSICKERMRPVKAALKQLDRPEKGLSEQLEHTRQCLIKIGDHITECLKEYTNPEQIKQWRKNLWIFVSKFTEFDARKLHKLYKHAIKKRQESQQNSDQNSNLNPHVIRNPDVERLKENTNHDDSSRDSYSSDRHLTQYHDHHKDRHQGDSYKKSDSRKRPYSSFSNGKDHRDWDHYKQDSRYYSDREKHRKLDDHRSRDHRSNLEGSLKDRSHSDHRSHSDHRLHSDHRSSSEYTHHKSSRDYRYHSDWQMDHRASSSGPRSPLDQRSPYGSRSPFEHSVEHKSTPEHTWSSRKT

SEQ ID NO: 55 - DNA, 87331 bp, Mus musculus
  misc_feature (1)...(87331): n = A,T,C or G
gtttactcgagctccgccgcctcaggatgtgttcccgcctcctccgtcccagcccagcccagcccagttcaaatcaaagctttttttttttttttttttttttttttctcataatttgaaagccgtgggaaggtggaagatagccacaatgcaaaaatcacacaaaaactggggcggggcaaaggaaccacagttacgcaagagaatttgtttaaaaagtttctcggctcagagtttgcaaaactgggcgcattttcctcagtcggcgggggactaggagattcccctggagaaggacgttttcaaacgtctgttgattctggaagatgggcattatggagttattctcaccaatagcaatcgccgttctgggaagctgtgttcttttcttattctctcggttgaagaatttgcttggacccccgtgcatccaaggctggattccctggattggagctggacttgagtttgggaaagcccctcttgaatttatagaaaaagcaagaatcaaggtatgtagcagtgacagggagtttggagggaggtagtatttccttttctaatttttcttttattaaactcagtgttggaacattgggcatacacatacttccggcaattcgtctactctgtttctctacataccttgttggaaatagtcaggtcttttgactgttagtaattccctgcagttaattctaagtgggtgtttattaacattgcagatgtaagcttgtagtttgggggcggcgacagaagagtttccatgatttcagtttgtgaaaacgagtaataaatttgtatcacaagtagaggtaactctacgattttataaaacttgatttgctaaattgatctttacagattaaaagctccccaatattctttctttctctccccatccctaccaccagatactattttattggtgagttcctccctcccttattccctgccctgaggaaataagtaatggattccactgtaagggtttttttttttttttttttcccataaagcagctactgaatgttgaacagtttagagaaggcacttttactggctggccttttaatttctattcatattttggcggccaagatcttactgtggttttggttgggaagccagcatggtggatgaagtgctttctgcagcaaccacaaaaacctgagtccatacctcaacccctccaggttcagtgagagaggctttgtctcaaaaactgaggtggagggccagcaagagggctcggtgggtaaaggtgtctgctgccaagcttggcatcttgagattgaaccttagaacccacatggtggaaggagagaatcagctctctcagattgttctcagacccccacatgggcgctgtgatacacacatgcccatattccatgtaaacacaatatatgaataatattttcttatcatttagtatttcttctagccctcccccacttctgtgtgtgtacactcatgtgttggtgttctaatccatgcatgaaggactacatggagttcaaaggtttgcaccagggtgtcttcctagtttgtttttccactacattttgttgggacaggtcctcaaactgcatctggagctcatccagtcagctaagactggctgtttaacaagcctctgggaactgcctgtctctgtctccctggcttctggagaattagggatgcgagcttttatgtctgggttttgcctggggtctggggatttgaactctgatcctcatgttggcacagcaagcactttgtccactgagccatattctagtctttgatggctgtatttcatcaaataaggataagatattttatttaaattccagtagttgggtgatatgggttgctgctaactgcttttcgttgtttcaaccattccctcaatggatattcttatgtgcatgcagttgaacatttaaaacttatctgtgttgaggcgtgcatagctgtagccatcttgttccacgcctgccagctactttatatgggtgctgtaatatgcctgtcagtcactgatgcacaaaaataactcgactaagaatagggtcatgatgaaaacataccctgttaagtactgcatgagatttgttaagcctaacaaattccaccactataagcttcacttaggacctatgaaattaaaggtcaatatgaactgtgatgtttaaaatggctggagtcagggccgaactctgggcagctttccaggacctgagcatgagctccttgtgtttttctggttttagcctttaggccctgagaaatgtccagagtgaagcattcagctctcgagcctgagctttgttgctctggttgatcagtcatggtgtgtgatcaagaaaccatttctgtttaactgagatcagtattcatggggtttgtggggtgactcctggaccccaacaatttgactgtttcctcaggataaactccaaagatagacttgcttgtggggaaatacacaatttatttttttaatgattgcattgtgttattattttactgctttgaaaaagatgtaatatatacttttaatctttatttagacgtaaaatgtgcttatattaaattctgtaccatactggataccataattatgtgaaatgtttactagtctagtgcatgaaagatgaagaaggatctttcctaaaagtatttctttgtttcccacagccttccatgggcatagaagtttagtaatttgtaaggaatgtttgaaaaggctatctcagatcaaatatgtgtgagtgttctgtagttttctgggtcaaacgaaacaatgagagtctaccattatgttatgtgacacagtgtgtgtgtgtgtgtgtgtgtgtgtgtgtgtgtgtgtgtattttttctctaaaaagctatagcaccattgatgtttgaatcctagaagatgatttttaagacttattacatggtcaggataatagaaagtgcatcagagacctttaaccatgtaaactaactcaaagttagtaagactcaaagcaggaataatcacccacccacacattccctaacccacccacaaacaaaacacagaaggataaaaacctgaaccagcatttttttaaattagatattttctttatatacatttcaggatattacatatcctgaaagttccctatacctccccccaccctgctccccaacccacccacttccgccctggctttcccctgaactggagcatataatcttttcgaaagtccaagggcctctcttcccattgatggccaactaagccatcttctgctacatatgcaactagagacacagctctggggcatactggttagttcatattgttgttccacctatagggttacagacccctttagctccttgggtactttctctagctccttcattaggggccctgttgaaccagcatttttttgcttctttgtttgatacaagttcttacagtttgattagtagcctggcctggccttgaacttaaagccccccaatttgagtacttagcccactggggacagggattcaggtgggcagggccatgccttggtcccagtcagctttcccaggctacttacacaccatttgctttctcagacagattagtcaagaaaaactgcactgtggaagtgcgaaactttctgcagtctctcttcatgctcgtgacatcatcagtcttagcgttagggtgcaattttggaagagagtagcctaccttttcacaatatctgcagttagccctacttttgatggggaattttagttatccggaaactctacggggaacatggcttgttggaccttcagggaaggatttgtagaactctgtgatgagattcagtttgagggctgcacgagtcttctgtgtagtttaatcttgaaacaggtgctgtattagcattgttcaacattttaaaatattaactgtcaggacaggcttagaagacggctcagttagcaaaacaccagatgggcaagcatgagacccttccgcacacctgtgatcccaggtggagaaagcaaggtcactggggcttgccggacagccacttaagccagttcctgagttcctggttcagggagagaccctgtctcaagaaatcagatgggagccaaggaaaaaaacacctgtgttgacctctgtcctctgtgtgcacgtacgtgcacacacatggacacgcaagcatgtagatacgactctagtggaaagcgctgctgattctgtgcctgtcccagcctcgttctcaaccatcgttctcaagctcagtaaggctgcttcttctcttaccagtccccaggagctggaaatgcacttccctgcggttggcagtgcagactgagaactcctgggcacctgggtggggctttacttgggtgtaccccagtttttcaagtcccccactgaaaatgaatgttagggtgacccagggtgaggtaaaaaggtagtgagctagtgttctctcaatcaacaaagacaacagaataaataataataaagaaagcagaaaagacaagggacacttgaagagagccaggtgtgggcttagaaaaggaacggcctgttatgtaacctaggactgtaaagtggtgtgatctacaactgagataggagatcggggacagtcttgttggtacggtttagttttcttctccatgaaattatgacttggaagaagaaactttgaaggttcaatgcacatgctgcaaggtagaggagagagtgttggaaataaaccattagccacaggtcagaagaagagtggatttaaggttatcagtcattagccagagtaaacaatctagttggaatgtttctcaggacttagagttcctatgtgagttcagaaggctgacgcaattactgatgatgttgcagatgtgctgatatgtgtggttaaacgtacattaatgcttacaatcactcaaacaaggatttaggtaaaaatacaaaccaataggtttaatccgtatttgctaagaacccccaaaatgccaattaaaatcatcagagatctagccaggtggtggtgttgttgttggtggtggtggtacatgcctttgaaatcccagcactttcgaggcagaggcagaaggagcagcagactgccctctgagtttgaggtcagcctggtctacagagctagttcaaggacagccagggttacatagggaaaccctgtcttgaaaaaacaaaatagtcggagatccctttggagcagtggtcgttgattgactaagccaatagtcaaggcatcagttgggttcaaattgaaatccaggaatgctttcaaattctctgggagcttgattttagattctgtggacattgttctaagatttgggtggaaaggtcaaaggaacacaaaaacaaaacaaaacaaaacaacaacaccccagaggaattgttcctctcagtttctatgcttagcagtcactaggactgtggtgccaccagtgtagtaaacacagggatggatggaacagaatagagaatttggaaaaccatccacaccagtgagctcagctgacttggggcaaagaggcagtagcaatttaacggagcaaaggcagccttttcaaatcctggtgaaacagttacatgctcatgagccaggagggggaaaaaaaaaccaacagtatataaaacaaaataggaaagtaaacctaagactcacacctggagaaaacagaacaaaacaaaacagaaaaccaaaaaaaccaaaagcaaaaaaacaactcaagatagatccctgtcttaaccagaaacataaaggagaaaacatcaggaagaagagaatagcaccccctcattgggtgtaggaaataccacggtgtttggcacttaaagggcagcctatgaagagctgatgagccgaacttcgtcaaaatcaggtccatctctttgtggcagaacccacaaggaggacaaagaggaaagcttccgagtggcataaagtatgtgtgagccccatgccccatggaggaccagtgtctcctggttaaaaagagccacggacaatcaaaggcaaagtacagaccagttagaaaacggatgccgtgatgaggatctccagatggcagtgccagtcacagctgctggtaaagagaaaaggagccactccaatctgctggggatgcctaacggcccaaccactctggaaaccacatcagccatgtattagcagaacacgcagctaatcatgtaactcagcactgaagtatctcatgcagaaatggaaactcaggtttacatcgcaacctggctgcagctttatccataatccctttttaaaatacccttggaacagggccccgaatgtccttcaggaaatgtccttcaatgtctgtggaatcctgttcagaaatgtatagacacgaagccttgacaacacagagaatctagatgacactggagcgtggttttaatggtaaaagttactctcaaccgtttgtatgccatctgactccatttatataggatcttgaaattcaattacagaatgaaccatccctaagagttgaggcagagctcagggtgagagaagagctagtgtcatagaatggtgacaagacaggacttggtggtggtgatggggtctcttgactgcatctttgcctggagcctggatgtttttcaagctactaacaccagggacaagagagtactgagaacctgtgtggtctctgcagtgtttcttctacctccttgtttatgtagatcccacattacaaactgagttgcagatgcataagaaccactttgaaacttactagatgctcctgtctttgcttcctaacgcttaacctgctgccattaaattaaggacaggagaacaaaggggaaacaaataaaacagaaagtcactgctgtagagtttgtggctctacacggaatgattttcaccatgcagaatactaggaagagttcttttaaacagcagcaacttgggtcagcagtaatctcagtggctcattgtgtttgaatttggtctcctcttgaagcccctaactaaccattgttacagaaggccactttcctaatagaaagttaaaaaaatgaacattttaaacacagcctgaacagtgagaataatctgctttcttttaagtattggctagtaaacgattctaagtaggtaatactggaaggtggtgtttatgtgtgggtctgtatgtgagaaatgagactctggtcaggttgtgtgtgtgtgtgtgtgtgtgtgtgtgtgtgtgtgtgtgtgtgtatgtgtgtgtatgtgtgtgtgtgtatgtgtgtgtgtgtatgtgtgtgtgtatgtgtgtgtgtgtgtgtatgtgtgtgtatgtgtgtgtgtgtatgtgtatgtatgtgtgtgtgtatgtgtgtgtgtgttttcagtgttcagtgattcttgagcttacagcttgtctagtagcacccctaacacttaccaagactgtaacaagtgccagtctcatgattagtgtgaaaatgagtaacactgcagtagtgattcgagtaaatgatgtctttagatacatatgaggcttaaaatgggccataaagccatgatggctcattttcataatgggtggtttgttgccaacatctgtaatggatgctagagcataattagaactctctgaaaatggcatccatttcctccaataaggtcataaactctgtacgagtttcctttctgttgctgggagaaaacaccgaccaacaagaagttagaggactcttttggcccatacttccagatcgcagttcatcactgagttaagtcgtggcaggaactcatcggtagaaactatgtaggaacactgcttgcacattcatgtttgccctgtgcagcttaggaccacctggccagggaatggtgccacccagagttgtctgggtcttcctacatgaataaaatattagtccccttccccaacacactcacaggtcattatgatctaaacactctctccattgaaactcagtagatgctaggcttcctcaagttgacagttgaaactaactagggcagactgccagaaggcagacctcatgcagggaattacgcaagagagaaggaaaagtgtatcaggaagtttgtaaagtttgtcaagtctgagctctggtgccaggaaagaggagggtcacagaaagctaggaagacaatggccaagagaaagataggagtcctagagagacaggacatgtgatctataccagcaaacaggctactaggcaggcagacacccaggcaaatgctagcacatgtaaatatgtggtagcttatgcaggcatgcacgcacacatagcagcacacagcttacaggtagccacacagacctacacagggtctggcaaagcaaaagttgacttgccagtgaccccaaaaccatacttttagagaatcagacagagttgacaatctttctacagtgattacatagcagactagattattgctgacttttggcttccctgagcatccagtgtcactcagtttctgccccttattctgcttattagccatcttggcccaggcctggtatccataccagcaccatgatgtctaaacatgaacaggcctctaaggccttctgttctcttcagtttcttttgctcccttgagaagtattgagctgtatgttgcttataagctgcttcttatcttgaatataggattgaaagatctctacagtggtatatttttaaattgtttctttttcctaatagccaaaaaaggaagatgggatagatatatttttaaaaattaattgatttacatcccaaatgctgcctcactctgggtccctcccttacagagtcccttcccccacccccctctaccctttgcctctgagagggtggggcctaggataggtatcttattgtgcatattttaggacaaaatgaattaggattcatataatttaaatgtgaccaaaacgggttttctagtaactaccacatgtaaccagatttttcaaatatctgtgtcattgcttcatcactggtattttttattttgtttttaagggagagagagagagagagagagagagagagagagagagagagaggtccatgtgtgcactcatgaatgtgaacatgtatgtagatacctgtggagaccagaagggggcatcagaccccctggagttatatacagatgactgtggaactgtccaatgtgggtgctaaatactgcacttaggtactctgcaagaacagtacacatcctttaaaactgagccatcctgccgagtaccagcatcttgcttcctgacagcagaccaacatgatcacctgcctctggctcctgccaccaggactcctggccctgatgaactgactgcacccacaaactgggagccagaataaacccttcctcccttaaaaacaaaacaaaacaaaaacaaaaacaaaaaactgagccattactccagtctaagtacttaaattctggaggaaaaactgtgttatacataacatgtgatttagcaatgcttactaatatatctgtgtttttgtgttttattctagtatggaccggtatttaccatctttgctatgggaaaccgaatgacctttgttagtgaagaagaaggaatcaatgtgcttctaaaatctgaacatgtagattttgaatcagcagtacaaagtcctgtctatcacacaggtaactgatatttttagatcgatcctttgagctatagcattgaaacccaagagtagtttcaagtaagatcacatccctagtcttctatcaagaatagtgaagggcaattgttttgtttttaaagcaggactagaagggggaaaagtacacatgataaactgggtcattgaaaaggaaactattgggagtctaatatatttaggtttcacttagacatatggatgagtcaggccccagtggtcattttagagactgtctagactctcaatgtatacagcacccaggtgttaacttcagcagacggctgtgcacacagtgttccacaggcttcggctcttggcttgattgcactctgcttctccagagtagagttcatctgcttaaccaacaagccattcttatggactctcctgatagtgcccaaagggtcaataagactctctgggttgatttctcccatctctcagcctccatctgtctttgagtctgcttgctggtactggagaatgtgttcctggtgtggctttttctccccagcatgcaaattcttgtgcatgcaccatgcatcctccccagaatatctgccctggcttcttctttttgccccacagatgtccttcttcacccctccctcccnnnnnnnnnnnnnnnnnnnnccctcctcccctccctcccctctttctttctttctttctttctttctttatttctttctttctttcaatcctttaatattgtactcggtcatgcatttcctggcattaagccaaaaatccgtcacaatctctgagtgattaaaagtgtaggtaatttttccttgaaaggtcgcagtaatattggctgaatttactgttccccagtgtttgttggtaaatgagctatggagcacctagtcaatgaatataaatattttgaaggctagttttctatgtgctaacatttcttcagtaaaagatactaacttatgtgctagaggcatacggacattatcagaacgttctcccgggtctcccctgtggcctctcacttttgatcatttctgttgaacagataaaatccgttacaatttactcttgatccagcttctcattcctaccaaacattccaccactgtgatcagaaaaatctcaatttaatttagctcatacacaatatatcctgagcattgcggaatcataaaatacaaattattttaaaaggtggtttaaagacaatcaaattagataaactagataaaaaatgttttagaaagtagacaacaacaacaaccaaaactctagcctctgccctgacctaacctcaagctgatattgtagaaggaagaggaatatttctattagaaagtgttttagagcaaggtcagggttactctgttggaagaagagaactagaagggaaaaatgtggggatattggtgtgtgtgtgtgtgtgtgtgtgtgtgtgtatgtatgtatgtgtgtgtatgtgtgtgtgtatgtatatgtgtgtgtgtgtgtgtgtgtgtgtgtgtgtagaaatgggggtttgtgtcagagagtagtgaattagcttagggtaaataatagcatctagagtgctgagacttttaagatactctgcattctcttttcttctttaaaacttaactccaccctatatggcatcccagcctcagtttcccctcccatctcaatccattcctcctctaccccctacccccagaaaagggcaggcctcccaggaatattaaccaaacaaggcagatcaagttgcagcaagaccaggcacctctctccacattaaggctggagaaggaaacctcataggaagaaaagcttccccacagcaggcaagagtcagagacagcccccactcccactgttgggagttccacaggaacatcaagctacaaaactgtaacatagatgcagagtccgggtcagaaccatactggcttgctggtggtccactcactttctgtgagcccccatgtttagttgattttatgggtgttcttgtggtatccttgacacctccggctccttcagtcctgccttcctcctcttcatcaggattccctaagttctgcccaatggctgcggatctctacatctgtttccagcagttcctggatgaagcttctctgagataagcacctatctatgtatcactaggaattattttattgactttttaaaatatattttattttattttattttatcttatttatttttttggtttttcgagacagggtttctctgtataactctggctgtcctggaactcactctgtagaccaggctggcctcgaactcagaaatccgcctgcctctgcctccggagtgctgggattaaaggcatgcgccaccatgcctgactttattttatttttttgatgtatgaatactccacatgtactactgcctgccaaagagggcagtaggtccctttataaatggtcatgagccaccatgtggttggtgggatttgaattcaggacctctggaaagaacagcctttgctcttaagcactgagccatctcaccagccctggtttcccccacactcctgtggtcatgtttgttctatcctaggtctccaggctattcatcctctggttcctggccctccaggcagtgtcaggggttgtctccctcttgtggcataggtcttgagatagaccacactacttgagttgaccactcccacaatttctgcaccacctttaccctggcacatcttgcaggcaggacaagttgtaggtatatagttttgatggtgtcccaatccctctactagaagtcttgcctggttacaggaagtggctggttctggctctctatctgtcattaataggtctgagctagggtcactcttatatattcctggatgtttccattgtactaggtttctaccttgccccaaaatgtcccccaatttcagcttcctctcccaacactctctccttccatcgtcccccacctgatcccttctgttccaatacccatccccccatcttctagttcactttagatataccttgaatgtagatctggaggaagaagggatcagccctctcactcacagatgactttgcacacagatttaatgattttatgtgctgtgaggacactgacagtgatatagactatatgccacaagggatcgttgcctcttttgaaaacaattccctttgtctttagcatggattccaaagaatgtcttctctgcactgcatgagcgactgtatgccttgatgaaagggaagatgggaactttcaacacacatcactttactgggccgctaactgaagaacttcatgagcaactggaaggtttaggcactcatggaacaatggacctgaatgactttgtaaggtaaaccgtgcttgttctaatcttcagattagaaacaagcctgttggatttcaaaattcacctggtagattaatgtactctaaccaggccactatgagagttcttaaaaactcatttaaattctaaagaatgttcagtttctagttgagcagtctcagttgatggtgagcaaaccaaccagcagtcatggacacacacaaatgaatttctcctccgtggttgtaacaatcatatatttgtcatatagaattcctgcttgtgattgctatggatccacgattcgctgtttattgtgttattaggttaggaagacttgagaggacagaggagatgatgaagtcagaagtgggtaggagggacccaggagatgtttgtaagacttcagaaagaaccccagggaaaggcaggaccttgagggtttctgagaaaggaaagagagggtgtaagagacaggagagacagggaggagtaatgcagggagtgagccatgttcacaagctccctggaaaaggtgaaggttgggtatgggatccataagaaacattttctacatacataagtattctctatatgtgagaaaattctctacttgtggaaaaattctccatgtctgtgaatattttcatgtgtataaaggctctccacatgtacagaattttttcacatgtataaaaaaatccccacatgcatgaacattctccacttgtatcaaaagttctccacatgtacaaaaaacaaaacaaaacaaaacaaaacaaaccccacatgcctagcaagtctccatatgaaaaactgaaataccaaagccttttctcacctgaggagaatcccaagactctaaagagagaatgaactggaaggaggatataagctctcaaagtcccaccccatagtgatgtacttcctgcagaaaggctctaccttctaaaaattccataaccttcccaaacagtgccactaagtgagaccacggcttcaagtacagaagcctataggggacatttctcatttccttcataacacaacagataacatcaacagatgtttcagtagacagtagtttgaatatgcagaattttgtgagaaattaggtaattaatgattactattgcccctttttgctagtgtatttattgacatgtcagagacagtggttgcctgcttgttactattttctaaatacatgtctcctgaatttcattcatccagcccattatttatagttttgtttgtttgttttgtatttgtctggacctaagaggcttccttagaatagatttttaagtctttggggctggagagagggctcaggagttaagagcacacatactcttcccaaggacccaggtttggttcccagcacctagattacacagctcaaaactgccagtaactctagtgccaaggggatccgacctacctgatctccccaggcccctgcattcacacacacatatctctaaatatgttcaactagaaagggcccattaattagaatctaaatgaggttggtttttgtttgtttgtttgtttgtttgtttgtttttttaagtctcataatggcctatgtcttagtcagggtttctattcctgcacaaacatcatgaccaagaagcaagttggggaggaaagggtttattcagcttacacttccatactgctgttcatcacccaggaagtcaggactggaactcaagcaggtcaggaagcaggagctgatgcagaggccatggaggggtgttccttactggcttgcttcccctggcttgctcagcctgctctcttatagaacccaagactagcagcctagtcccacaaggggcctttcccccttgatcactaattgagaaaatgccttacagctggatctcatggaggcatttcctcaactgaagctcctttctctgtgataactccagctgtgtcaagttgacacaaaactggccagtacagcctagttagagtatattaatccaccatgtgagttttgaaatccagaggaaacatgtgcatacacttaagatcagttgttttttgttgttgttgttgttgttgttgttgtttttaagaaaggatttttgttgttgtttttgttttgttttgtttttcgagacagggtttttctgtgtagccctggctgtcctggaactcactttgtacaccaggctggcctcgaactcagaaatctgcctgcctctgcctcccaagtgctgggattaaaggcgtgcgccaccactgcctgctaagaaaggatttttaactcttcagataaacactgttcattttcactcatctttgaagcgcagtctgacttccaccagcaaatgggaaaccttttcctcaaagctgtgtcccatgtcacatgatcccgtactcgatcaattgtcattttaagagaatgctgcctttgtatctagagcagtgttctcaaccttcctaatgctgtgaccctttaacacagttcctagtgttgtggtgacctccagccaaaaaattaccttgttgctacttcataactataattttctactgttgtgaaacgtaatgtaggtatttgaacccccaaaggggttgagacccacagggttgagaaccacctattctagagcttttcctgttggctgctaggttgacttcccaagtgttcccctcgttacaggtatctactttatccagccacactcaatactctctttaagaaagggttgtttctcacagacaagaggacaatcaaggaattctaccagcagtttaaaacctatgatgagggctttgagtatggctcccagctgcctgaatggcttctgaggtaggtgccctttctgtgattggctcttttcagcaacttatttatagtgttctttccctctccgctatgtttgtgtgcacaggtgtgcccacctttgagcatgagtgtggaggccacaggaggacgtcagctgtcctgctttgtcctcctcgactacagtttttgagacagggccactcaccattttggctagactgtatggtcattgagccccccagcatgccccatgtctgcctgggggttacaaatgcatgctgctgtgctggcttttacatcatgctggtgatttgagcacaggtctttaagcttgcacatcaagtctttgactttctgagctaccgttcgtttctcttatttgtgttctactttgtttttattttaaggtaagtgtgtgtgtatatgatatatgtgtgcgtggggggatatactgcacttgccgtagtgcatgtgtgaagataggcaggggggatgttgggttttggggctcaccttctatcttgttttggacagggtctaaacatctcactgtaattcaggttagttggccaagcttctatggatactgttgtgtctctgcaggaatgcagggatgacatgtggatgcgaccagacacccaggtttttgtaggttctggagaattaaactcctctggtcctcaatactatgaggcaggcactttatgcaccgactcctagtcccagtcctatttctttctcttaagtagaataacatcagctgaggtgggaagaagctgcttcgctgacttcttctctttgtaatggtggtgaggggggctgcagtgtcctcactacgtagcctaagctggccctggaattcatgggcccagcttacagggtgctggcttttcaggagcgcaccatctcaccagactctagcctgcttattttagtgcacatgtgtgaagtgaaggaggaacaagaagaaatatacttctttttctcactctactctttctttcttccatcctgcctccctccctatctgctgtctcccttccttcctgagaaacgtgtgtgtgtgtgtatgtgtgtatgtgtgtgtgtatgtgtgtgtgtatgtgtgtgtgtgcacgattcttgagagagagagacagagacagagaggcagagacagagacacacacagagacagagagaagctggcatgagaaatgcatccgaggcctttcctgtgtacagtgtgtaccattattgacttgattctgtctgaacccatgcggaatcagccctatatcctgcaaggtcacggtaggcgtggtcaaattcattggctcacatcaacatttgtaacatgctgtgaaaaataactgcattttaaaaagtatttggtaatcgctctctgttttatcctatttggatagttaaaggtgtcatggacaggtagcttataagcaataaaaatttattttccatagttatggaggctatgacgtccaagatgggggcacaagcagggtggtttctggggaggttttttttttccctggtggcagactgtcaacttctgactgtgccttcagggtggtagagtcaatcaaatgttttccagtgttttataaaggcactaatcccatcgataaggatcatgcaatcattgtgctccttgccatcttccctgatacaatcacctgagtggtgagattttcagcatttgatttggcagaggacgaagattatctacagtaggtggtggtactagccagaaaggaataaaatgatgatcacttgtggacttgacgcagcttagtcaacatctggcctctgtgttggacctttgccttgactctcttgggacaggcacattgaacatgaaccaagctattggctaaccatgtaacgggagtccactaggaatcccaggagctagttaccaagccagtgaaatgtattgacctgctcctcagtattacccgtggtcttataattcaggagtgggcctctttggaaattctaacacggaggccaagaagaaatttgaggaaattattctactctcagagaccttttgtccctttatgttctggcctgtcgccctaagcacttgcaagtcactgcttatatgattttttttttcttatgcagaaactggtcaaaatccaaaagatggctcctggcgctgtttgagaaaaatattggcaacataaaagctcacggatctgcaggtcattctggagtaagtgtcctcttccttcactaagatatatgggactaaacagcgattattacaaaaccatttctcctaggagatgtgggggattgggtatgcccaagtgatatgctgggcatgcgcacatacattaccttattgttattaacctcacaacacgaaggcattctattctataggataacaaagcagatgctacaaacagcagcaacaacaaagtgaaccttggggattttaaaatttattctcatagttggctgtgtcaaaggacacaattacaattgaatggtcttggttgctttacagtgtaattctcgagttagacaactcccccatctcatgggctgagcagaacaggttgtctttatagaacagagctggagaaatatgaaactcagaaacaaacaaaagcaaacaacttttaaaactgaggacagagcaacagagcaataactggctggttaaaactggatttttctggttacttaaggaagtacagagcacattagatgcagcttcgtctcattactcttggcctgtttaggcaatgcccacctctcacttcactcctgatttctaagaaggtcacatagcaccttagcttccaatgagtctttgatttgatatgagactttggtttgagcaattccatattgtttttttaattgttacttggtttcattttattttcgagacagggaatatcactatggtgaccaaaatataacccataagttcctgatcctcctacctcagcctcctgagtactgggactgtaggaatgggccccccatgcctggcatcaattttgagttttagtttggaatagaagttttactggaataaaatcagtgggttcctgtggtggtttgaatagatttggcttctcataggctcaatgtgtgtgaatgcttggcccataaggagttgtactattaaggatgtatggccttgctggagtaggtgtggccttgttggaggacgtttgccactgtggaggcgggctttgaggtctcctgaggtctcctatgctcaagctaggcctagtgcaacagtcttcttctgctgtctgcagatcaaggtgtagtagtctcagctccttccccagcaccatgtctacctgcatgctgccacgatttctgccatgataataatggactaaacctctgaaagtgtaagccagtctcacttcaatgttttcctttataagagctgccgtggtcatggtgtcccttcacagcaataaaaccctcactaagacagcttctatactgtgtgtcaacacctgcatggatggtgagacacaggtgtgagcaaaccagggcaggataatgaagctctataaaacaggctctgctcctgactcacttccacaagtcacttctctctgtgaaagcaaggagctgatcccatgtgagtgacttgaaacatgaggcaggaggaacggtccccgggtgttattcaggagccgtgattcttccagtgtggtttgaagtctttttgcatcacttggggaccatacacaaactggggtggagcctagaggcctgggtccccagctttccaggcatccttgacgcttgctatggtgaagttttttagcccctggctgtggttagagttacttcttggaactttttttaaaaagtcagatctgattgctgggacctttgccctcagagtctgggcttcatttggtctgggttgctagattcagtcaccaggtatgtgacattacccacaggacctaacatctagacctcactttcctggtctgccctatagaccattatgggggttaagttggttaatttttgtaatgggcattggacatggtaaagaggagatgagagagagattgttttcaatcatcatttaaaaactcatctctccctcttctgaggtcttttccaattgctttcttcagagacttgaagttcctgtcatacagatcttttacttgcttggtttgagttccatggaaatattttatattatttatggttattatgaagggtgttgttttcctgatttctttctcagcctattcatagtttatatataggagggctactgatattttttttaaattagtcttgtacccagctataggagttctctggtagaatttctggggtcacttatgtatgctatcatatcatttgcaaatagcaatactttgacttctttctttccaatttgtatccctttgatctcctttagttgtcttattgctcaagctagaacttcaagtactatgtcaaataaatatggagagtgtgggcagctttatcttgtccctggttttgtagacttgatttgagtttttctctatttaatttgatgttggctatataggcttgctgtaaaccatctttattatgtttaggtatgtcccttgtcaaaatgagaattagactacaatctgcagaaactgtgtaataaaattgggcatggagtccagtacttataatcccacactgatggagataggcaggtccctgaagctcattgctcatacagactagcctaaccttttatctgtatgccaatgcaagcctccatatttttttaaagggcagaagatggctcctaatgagtgacaacacatgctgcaatcttctgacatgcacatacatccacatacttgtgtgtgcaaacccatgccgatatatgcacctgcacacctgtaagtatgcatgcagagaatacatagtcatttaaaatccaggcctaaagtatctgaagtcccaccctctcagaaggctggggcaggaggatggcacttgcctggacaatctagtgagagagtgtatcttagttagggttttactgctgtgaacagacaccatgaccaagtcaagtcttataaaggacaacatttaattggtttggcttataggttcagagtttcagtccattatcatcaaggtgggagcatggcagcttctgggcaggcctggtacaggcagagctgagaggtttacatcttcatctgaaggctgctagcagaatactggcttcctggcagctaggatgagggtcttaaacccacacccactgtaacacacctactccaacaaggccacacctactccaactgggtcacacctcctaatagtgccactccctgggccaagcgtaaacacaccctcacagtctcaaaataaaaaaaaaaaaaaaaagaagactgtgggtgtggtcaaacgatagatggtctcccagcatgccaaggctctggttctaatcgatagtactgaaaaacaaacaccccaaaacaaaacaacaagaagacacttcaaatatttcagcatttaaaaatggtatagaattccagaccaaaaaaaaaaaatgttacagaaagcttctgatcttagttatatagcaaatgtcactaacaatgctacttaactctagagagggagatggcctcaggaaaaagaaatgtgtaaatgatttgtggttttgacagtcacttttaattttcaaaatgacataatctcaaatcacatggaaagagtgagttaatgaatgtgggattgtatggtgggtgtgtctcccagggattgttttgaatgcactgggggtggcaccattccctaggcagaggatcctggattgtattatagtggagagagccagctgagcactagcctgtatgcattcattgtgctttatttttggctacgtatgtgactagctgtttaaagttattactgccttgatttgcccaaagtgatcatccgcaatctggaattatgagctaaaatagttcctttctttcctaaattgcttttgactttttttttttttttaaatcccagctacaggaaatgaaaccaacacaaatatctttttccttgtccttgaattctttctgttgttgtgataaacatcatgaccaaaggaacttgggggaggaaaggttttatttcatcttatacttccagatcattataatctatcattgagggaagtcagggcaagaactccaggcaggacactggaggcagggaccactgaagaactgtgcttgctgaaggctcgagtctttcacaggcctaagtttcattctcactgggctgggtcctcctatagcaatgaacatggacaaggtagagacccctgaaacagcttgatgtggtagagagtagcagaaagtaaaatccataactaaaatgaccagtgctgctctgccatcactatggactggataacgacacactggctaatattcagaggtgggttactatgggccaggcatagttgcccgtctcacaaagccgtttcgtgtttcttagaacaactttaatgccaagaagatggactggcagagctagttgatctggcaaacttgtgagcctcactaacagcaattgagcggcagaagcagctccattttgatcctgcccgtgcttgcatttctttgacttgactgtgcttgtttcctctggtgaatgctcagtgtgagcacgagtggctgcttctcagagccatggctgacgtacaaatgagctaaacacccgtagagacctcacaactgtactgttcccaggccggcatggcacacacaggtcagaactcccgtattgttttcctatcccctgtactgagtaaataaagattaaaagcacatcctgtgaccaagtctctgccctcttgtggagaaacaacggtgggcaaaagcaaatgagagaaatctctgaagaaagtcaggttataggatttctgcagccgcctgggaacaaccagagtaggtgggctctgctctgctctgatccgagttggttccacttaagtcaaaacttatctgctcatttgtttttctaggaggttgaacctaggtcctcataaatgctaagcatgtcctctgtttctgggatatatccctagttctccttttcactttttaatttgagaaagaagttcactaaatgctgcttgaactcacattgcagcccaaacagactttgaacttgaaatcttcctactctgaccttccaagtctcttggttatagccctgcaccaccaggactggctacttaattttcctatgagcagagattgccttgttttagaaggggtaacatttaggttgagtctgtagttcttctagtggagtgcttgcctggtatgcacaaaaacccagttttaatctctgccagtacatccacatcaccatcatcatcatttccatagtaacagctgggtgttgtggcacatgtccgtttggaaggcagaagcaggaagatctctgtgggttcaaggctggacttgactccatagtgaattccaggtcatccagggctacctagtgagaccttgtctcaaaaaaacaagaacaaacaaacaaaaaaaaacccaaacatggtaattttgaaaatacaaacgtcacaactaaccaagcaatcctgggggtaggggatctatgttggggctaagggtgtggctcagttaggacagtgctggcctagcatgccaaaagccccaggttcactctgaatgaaccaggcatgggggctacactcctgtaatctcagcacttagagcaagaggaaggaggatcagagcatcaaggtcactgccagctacagagaaagttaattttctgtcaagtactttattagcaactgtactaactaatttaattgtcaaatttttatgatgtaagaaccatatcacggtcatcttaaggacaaggaaatccagtcagtgggatatagaagtgattcattcattcattcattcattcattcattcaggatcattcatttccttaatagtggagacaaaagacagaaatacagctaagctccactggagatcctgtttccctctgccatgatagcgcccactgtacacacgtccacgccttaggatgcagacacagtatctctcggattcagtgaatccagggtcacggctcagtttaggcaaagtgcttaataagcaagcttgagaatctgagtttgggattcccagaatgcacgaaaaaaaaaaaatctgtgagtagggacacgtgccagtatccctaacactgggtagaggctggtggattcctaggattcctaaagctccctggccagccagagtagcaggacttgggcttcaggttcagtgagagactcttcgaaaagataaatgtggcacatggtagaggaaagacactcagtgacgacctctgatctttgtgcgcatgcgcgcacacacacacacacacacacacacacacacacacacacacacatccacactaacaagtgtatagaacacccagagaggaaaaataatgaaatggtttcttgtttggggacatcggtcttcgtcacgcggctgtggtctaacaagagttatttccttcccagaccctcttgcaggccatattggaagtggtggagacggaaacacgtcaatacagtccaaattatggactggtcgtactttgggctgctctggccaatgctcctcctgtaagtacatgggagacaaggaggctttctttcatctatctagcttttgcttttgtttcttttctttttgttgttgttgttgttgttgttgttttgcattgttttctttttctcttggacttcaattcttcacacactttggggaactaaaagataatggtggactgggatgtaaggtctttcttttttttaaaaggagtgtttgatagagtatgtctcggtagttcagtggatggaatgcttgcctcatgagctacaggaccagagttcatgaatcctgctggatgcggcaggctgcctataaccccagtgcttgagaggctgcggcccaggatccctgcgacaagctggtcatctggccaaacctcagggttcagtgagaaacccttgtctcagtgaggaaggcatctgacgtcaacccctggcttctatagataagagcagacgtgcacacctgtctgcacagacacacatgcaaacacaccaggtatacacatgtgcgcaggtgcacacatgtgtgagcacacagcgtgtacagcactcacatatacacatcaaatcccccaccacactcccaaacccacccccacatactaagggggcatagtgtacatccagagtgaattcttcaccctggcatccaactagcccaaggaaaacttgccctttgtggtcctctgtgtgctgtgtaagaacccctgactctgttaggctatatgctctgtgctgtgcagttggacaaagcctagcaccagctttgaaccaaagtgataatacaccaactgatggtttcctatggaattgcttatctccagccactgtggtgtctatggaaaaaaaaatctctgtgtcttcatttcctttacaggaaatggggagagaagggggaagagagggagagaatgtgaatatgaaagtaaaacttgtgacatggtcataggcatgggttgctcatttgcctacatagtctctgtgagcatccaacaagatgctcaaaagatgcgctagtcaatgtccattgaatgtgtgcgtcccctctcctcctgagtaccattagtgtttgcattccttgtccccctccgttctataagcttctctctgaagggggcttgtggcattgaaattcacagcctatctaaagataacaggggcctataaagaccattgatttttatatacttgttttaattgactaattaatttagtctttgttttttagcacaaagtcttgctatggagcccaaggctgccgttaaatttgcaatctcaagggctgagattacattcaggacacacagtgttgggcaaccatttccaattattatttttcttttattaagtgatcaaaataatggggttccttatgacatctttatccatgtataccactgaacatggcttatggtcaacctcattatcccctcttgacctcatttctatttatttccttccttcttccctaagcatttcccatctgcatctctgtctctttgtgtctctgtgtctctgtatctgtctgtcttcttcttcttcttcttcttcttcttcttcttcttcttcttcttcttcttcttcttcttcttcttcttcttcctcctcttcctcttcctcctcttcctcctctccctcctcctcttcctcctctccctcctcctcttcctcctcctcttcctcttcctcttcctcctcctcttcctcctcctcttcctnnnnnnnnnnnnnnnnnnnntcctcctcttcctcctcctcctcctcctcctcctcctcctcctcctcctccttcttcttcttcttcttcttcttcttcttcttctctctctctctctctctctctctctctctctctctctctctctctctctgttcttttaaagtcactatgatctaggttaaagctaggagatccatctgtgattctctgctttgtctgctctgactccttatgttggttgtaatgtaagaatggctacctatggatttgtgtttaaggaaacagggacactcagcccaatctctggtaagtgtggtcatcaccccaccccccttttctttaacaactagaaataaaaccaatgtgtaaatattacacatttttccttcctgtttctgaaggggatttctgggtcccagtaactctacttcttttaacccactgtacagactagagcacagaggcagatattccaacactgctactcaaacatgtgccgcccgagagaatatatacttcatcacacgacaagcctatgcttccccctactctattggtccgatattcttttttgactcttctcaactaactgtttgagctacatcaacactgaagagcaacttcccaaacatgcacacaacagctacagtcagaggagtagttctcaggatctctccagaaaggtccccctggggaaagccacacaaagcactattgatcggacacagaggtctgtcctttgagagtggacctggcactggtctgaaaagatgtgtctcatgatgactgaaagcttcatcttgctggaccttccttgttggcacctcccagaggcagtctgacgcatgagcagagagaccttggaaaggcctttgcatcagatcccaagccagttcccatagctgggtgacagtgggctacacagtcctttaacctctcccagtctgcatctgtgtcctcatctgaaccgcttccaaggatggttggaggattttactggaaataataaaaagtgcttaacaaaattggtgctcattcattaagtgtgctgtgcagaaaacatcaccctcactgaaatcaaaggcttctttcaatggtccactaataatgaatatagactgccatgggtcccaaactcttgactcctgtcttaggtaggtgtcttagggtttttccattgctgtgaagagacaccatgaccaaggcaactcttataaaggacaacacttaattggagctgacttacaagttcagaggttcagaccattatcatcatggcaggaagcacagcagctctaggcagacatggtgctggagaaggagctgagagttctgcatcttcatccaaaggaaggcaggatcagactgtcctcaggaggaggttctcaaagcccacctccacagtgacacacttcctccaacaagagtacacctcctaatagtgccactccctgcgccaaagatattcaaaccatcatagtagggttttattgccatgaagagacaccgtgaccatggcaactcctataacggaaaacatttaactggggctggcttatagttcagaggtttagtccattatcaccatggtggtgtgcaagcagacatggtgctggggaaaggagctgagagttctacatccgggtcagtagatagcaggaagagataaatgccacacttccttccacaatgccacacatactcccatcaaggccacactcttaagagtgccattccctgtgagcttatggaggccattttctttcaaaccaccacattatacaccctggtcttcataggcttatagctgtatcaaaatgcagaaatgcattagaaccaactttaaaagtccccatatcagtctcaacctgataaaagtttaaaatctcttctaagactcagggcaatctcttaattgtaaacccctgtgaaatcaaaacgaaagtcagatcacatactttcaacatacaatggcacgggatatatattaccatttcaaaaggaaggcaaaaaatcataatgaggagatactggaccattgcaaaaccgtaagccagctgggcaaattccaaacacttatttccgtgttttatgtcaaagatctcttcagacctccaacttctttcacctttgttgactgctacacacttctctctcttgggctggttacactccttgttagcatttctcttcagtaagtatcccatgagtctggcatctccaacaggttggggtcttcaaggcaatcaaggcttcaccttcacagcttcaaatagtggcctctctagaccttcaagcaaggatgctcttaaacacacctcagtggctttccttagtcagggagggaggcttcacaactgtgtggccaaagctgccagattttgctgcttactggggctcaaacatggttcccttgttcaattatgtcttcgctaactttctgctttcaatggtttcctttatggcccaagctttgatgtcttgaaacttgacttgtagaccagactggcctcagactcaaagatccacctgcctctccctccagagtgccaggattgaaggcataaaccaccacattgggacctacacttttctttaattccctttcacaagttggaagcttagcagggtgggatcttgtccttagggctccttacctccacatcccaggtgctggaattaccatcctgtatcatttataaaaaagtagattgttttgttttggtttatttattttgctttatgtgtgagtgttttacctagcgcacataggtactaggtacatacctagtgcctgtggccatcagcagatatcagagtccccctggtactagacttctgggtagtgtgagctgctacatgagtgctgggacctaaacccaggtcctgtgtgagagtgacaagtactttaacctcttagctggctcaatagtcctcaaaagttctgtcttaaaggtagaaaacatcagattttaaaaataagaaatctgtgaaggaaaaaaaaaaaaaaagcactggacaccattgtgcagacatttgttactgacctgaattctaacgtctgccataaaaataaatgggacccggtgtttgtgattctcaaaaccagttaggcacacgggactctgagcccttcttgtgctgctgaagatcaaggagcatcatgggaattctttccccagcgaggactctgacttcaaatccgacgaactgagcgtagcgtgattattgagcaaatccaatagcttatcacttccactggtagctcacaggaggaagaacctcaggagggaccaaggcgacagtggcctgggcactgtgtgaagatgagctagataatctccaggctgagcccttcctaatccagatgctgccctagaatgtctgcatcgcacgtgttcgtctgttcacccctgtgcttccagcttaatgcacctttcaatgctgcacttcctcctttgaccacacgggggagtagttgatcatttcaagggacatcctgtttcaccaaagcaacaacaaaaagactttaagttatacagactgttacctcggtcacctaagaattgatttcaagaattgtttgtggttttgtttgtttgtttgtttttggtgccacttatggttatttatttttctttacatttttcatttttcataatttcatacatgagtttgcagtatttctaccctgcccgtgctccctgactccccctgtacccacctccattacttctcaagttcatgatctctttaacacagtagatgcttatgggaaaagaaagcaaaagggaaatccaagcctctcaggattttatgcatccctgtgtttctgtcctcagctggaagcacgttttttaagatgaacggttttatcttacatattctatataggggagataggaaagactcttttttttaattcaaaataatttattgtgataagtattaaatgaaggaaaaccatctccaaaaatatgttagcccttgaataaaatcataagcgtgaagactgtttataggacatttattttggggacagaagtgcagacaaaaaaagctaattcatagaagcatttgaagctggctggctgagtgatccggggtggaagcaggattcttagatgatggaaacgatggatgtagtatactcagtaggagacatttatgatttattacggttctaatggagatctttgctgtccaatctatatggaaagctgctgcactcagcttggctttaaaagcctagactgaggttccacgctcctacgaacagcaagtatgaaatcattcatgcattaccttgagttaccactgggcattgaaaaatcacattatataccaaataatcctaataggccaaaaagaaaggctttacagatgtacttgggtgaggtgtgggagagtgctgggtgttgagcctgtggccttgtcggtccataccacacgagtgtcttagcattgatctacccctccagcgcctcataagttacttaacgagatttaagtgtggcttcctgggattatttaaaattaatatgcttcacgtgcaagaagaaaaccccctagttcattctcacacattctttcttgctctccacgtggtcttgctgtctaggcctggctgctacacagtcacatgcaaaccaagttgtccttgaacttgcggcaatccccctgcctctattccccaagagctgagattatagctgtgtgctaccactgtctgctgctacatttgttttttttttccattttttattaggtatttagctcatttacatttccaatgctataccaaaagtcccccatatccacccacccccactcccctgcccacccactctccctttttggccctggtgttcccctgtactggggcatataaagtttgcaagtccaatgggcctctctttccagtgatggccgactaggccatcttttgatatatatgcagctagagtcaagagctccggggtactggttagttcataatgttgttccacctatagggttgcagatccctttagctccttggctactttctctagttcctccattgggagccctatgatccatccattagctgactgtgagcatccacttctgtgtttgctaggccccggcatagtctcacaagagacagctacatctgggtcctttcaataaaatcttgctagtgtatgcaatggtgtcagcgtttggatgctgattatggggtggatccctggatatggcagtctctacatggtccatcctttcatctcagctccaaactttgtctctgtaactccttccatgggtgttttgttcccaaatctaaggaggggcatagtgtccacacttcagtcttcattcttcttgagtttcatgtgtttagcaaattatatcttatatgcttgggtatcctaggtttggggctaatatccacttatcagtgagtacatattgtgtgagtttctttgtgaatgtgttacctcactcaggatgatgcccttccaggtccatccatttggctaggaatttcataaattcattctttttaatagctgagtagtactccattgtgtagatgtaccacattttctgtatccattcctctgttgaggggcatctaggttctttccagcttctggctattataaataaggctgctatgaacatagtggagcatgtgtccttcttaccagttggggcatcttctggatatatgcccaggagaggtattgctggatcctccggtagtactatgtccagttttctgaggaactgccagactgatttccagagtggttgtacaagcctgcactcccaccaacaatggaggagtgttcctctttctccacatccacgccagcatctgctgtcacctgaatttttgatcttagccattctgactggtgtgaggtggaatctcagggttgttttgatttgcatttccctgatgattaaggatgttgaacattttttcaggtgcttctctgccattcggtattcctcaggtgagaattctttgttcagttctgagccccattttttgatggggttatttgattttctgaagtccaccttcttgagttctttatatatgttggatattagtcccctatctgatttaggataggtaaagatcctttcccagtctgttggtggtctttttgtcttattgacggtgtcttttgccttgcagaaactttggagtttcattaggtcccatttgtcaattctcaatcttacagcacaagccattgctgttctgttcaggaatttttcccctgtgcccatatcttcaaggcttttccccactttctcctctataagtttcagtgtctctggttttatgtgaagttccttgatccacttagatttgaccttagtacaaggagataagtatggatcgattcgcattcttctacacgataacaaccagttgtgccagcaccaattgttgaaaatgctgtctttcttccactggatggttttagctcccttgtcgaagatcaagtgaccataggtgtgtgggttcatttctgggtcttcaattctattccattggtctacttgtctgtctctataccagtaccatgcagtttttatcacaattgctctgtagtaaagctttaggtctggcatggtgattccgccagaagttcttttatccttgagaagactttttgctatccttggttttttgttattccagacaaatttgcaaattgctccttccaattcgttgaagaattgagttggaattttgatggggattgcattgaatctgtagattgcttttggcaagatagccatttttacaatgttgatcctaccaatccatgagcatgggagatctttccatcttctgagatcttccttaatttctttcttcagagatttgaagtttttatcatacagatctttcacttccttagttagagtcacgccaagannnnnnnnnnnnnnnnnnnnnnnnnnnnnnnnnnnnnnnnnnnnnnnnnnnnnnnnnnnnnnnnnnnnnnnnnnnnnnnnnnnnnnnnnnnnnnnnnnnnnnnnnnnnnnnnnnnnnnnnnnnnnnnnnnnnnnnnnnnnnnnnnnnnnnnnnnnnnnnnnnnnnnnnnnnnnnnnnnnnnnnnnnnnnnnnnnnnnnnnnnnnnnnnnnnnnnnnnnnnnnnnnnnnnnnnnnnnnnnnnnnnnnnnnnnnnnnnnnnnnnnnnnnnnnnnnnnnnnnnnnnnnnnnnnnnnnnnnnnnnnnnnnnnnnnnnnnnnnnnnnnnnnnnnnnnnnnnnnnnnnnnnnnnnnnnnnnnnnnnnnnnnnnnnnnnnnnnnnnnnnnnnnnnnnnnnnnnnnnnnnnnnnnnnnnnnnnnnnnnnnnnnnnnnnnnnnnnnnnnnnnnnnnnnnnnnnnnnnnnnnnnnnnnnnnnnnnnnnnnnnnnnnnnnnnnnnnnnnnnnnnnnnnnnnnnnnnnnnnnnnnnnnnnnnnnnnnnnnnnnnnnnnnnnnnnnnnnnnnnnnnnnnnnnnnnnnnnnnnnnnnnnnnnnnnnnnnnnnnnnnnnnnnnnnnnnnnnnnnnnnnnnnnnnnnnnnnnnnnnnnnnnnnnnnnnnnnnnnnnnnnnnnnnnnnnnnnnnnnnnnnnnnnnnnnnnnnnnnnnnnnnnnnnnnnnnnnnnnnnnnnnnnnnnnnnnnnnnnnnnnnnnnnnnnnnnnnnnnnnnnnnnnnnnnnnnnnnnnnnnnnnnnnnnnnnnnnnnnnnnnnnnnnnnnnnnnnnnnnnnnnnnnnnnnnnnnnnnnnnnnnnnnnnnnnnnnnnnnnnnnnnnnnnnnnnnnnnnnnnnnnnnnnnnnnnnnnnnnnnnnnnnnnnnnnnnnnnnnnnnnnnnnnnnnnnnnnnnnnnnnnnnnnnnnnnnnnnnnnnnnnnnnnnnnnnnnnnnnnnnnnnnnnnnnnnnnnnnnnnnnnnnnnnnnnnnnnnnnnnnnnnnnnnnnnnnnnnnnnnnnnnnnnnnnnnnnnnnnnnnnnnnnnnnnnnnnnnnnnnnnnnnnnnnnnnnnnnnnnnnnnnnnnnnnnnnnnnnnnnnnnnnnnnnnnnnnnnnnnnnnnnnnnnnnnnnnnnnnnnnnnnnnnnnnnnnnnnnnnnnnnnnnnnnnnnnnnnnnnnnnnnnnnnnnnnnnnnnnnnnnnnnnnnnnnnnnnnnnnnnnnnnnnnnnnnnnnnnnnnnnnnnnnnnnnnnnnnnnnnnnnnnnnnnnnnnnnnnnnnnnnnnnnnnnnnnnnnnnnnnnnnnnnnnnnnnnnnnnnnnnnnnnnnnnnnnnnnnnnnnnnnnnnnnnnnnnnnnnnnnnnnnnnnnnnnnnnnnnnnnnnnnnnnnnnnnnnnnnnnnnnnnnnnnnnnnnnnnnnnnnnnnnnnnnnnnnnnnnnnnnnnnnnnnnnnnnnnnnnnnnnnnnnnnnnnnnnnnnnnnnnnnnnnnnnnnnnnnnnnnnnnnnnnnnnnnnnnnnnnnnnnnnnnnnnnnnnnnnnnnnnnnnnnnnnnnnnnnnnnnnnnnnnnnnnnnnnnnnnnnnnnnnnnnnnnnnnnnnnnnnnnnnnnnnnnnnnnnnnnnnnnnnnnnnnnnnnnnnnnnnnnnnnnnnnnnnnnnnnnnnnnnnnnnnnnnnnnnnnnnnnnnnnnnnnnnnnnnnnnnnnnnnnnnnnnnnnnnnnnnnnnnnnnnnnnnnnnnnnnnnnnnnnnnnnnnnnnnnnnnnnnnnnnnnnnnnnnnnnnnnnnnnnnnnnnnnnnnnnnnnnnnnnnnnnnnnnnnnnnnnnnnnnnnnnnnnnnnnnnnnnnnnnnnnnnnnnnnnnnnnnnnnnnnnnnnnnnnnnnnnnnnnnnnnnnnnnnnnnnnnnnnnnnnnnnnnnnnnnnnnnnnnnnnnnnnnnnnnnnnnnnnnnnnnnnnnnnnnnnnnnnnnnnnnnnnnnnnnnnnnnnnnnnnnnnnnnnnnnnnnnnnnnnnnnnnnnnnnnnnnnnnnnnnnnnnnnnnnnnnnnnnnnnnnnnnnnnnnnnnnnnnnnnnnnnnnnnnnnnnnnnnnnnnnnnnnnnnnnnnnnnnnnnnnnnnnnnnnnnnnnnnnnnnnnnnnnnnnnnnnnnnnnnnnnnnnnnnnnnnnnnnnnnnnnnnnnnnnnnnnnnnnnnnnnnnnnnnnnnnnnnnnnnnnnnnnnnnnnnnnnnnnnnnnnnnnnnnnnnnnnnnnnnnnnnnnnnnnnnnnnnnnnnnnnnnnnnnnnnnnnnnnnnnnnnnnnnnnnnnnnnnnnnnnnnnnnnnnnnnnnnnnnnnnnnnnnnnnnnnnnnnnnnnnnnnnnnnnnnnnnnnnnnnnnnnnnnnnnnnnnnnnnnnnnnnnnnnnnnnnnnnnnnnnnnnnnnnnnnnnnnnnnnnnnnnnnnnnnnnnnnnnnnnnnnnnnnnnnnnnnnnnnnnnnnnnnnnnnnnnnnnnnnnnnnnnnnnnnnnnnnnnnnnnnnnnnnnnnnnnnnnnnnnnnnnnnnnnnnnnnnnnnnnnnnnnnnnnnnnnnnnnnnnnnnnnnnnnnnnnnnnnnnnnnnnnnnnnnnnnnnnnnnnnnnnnnnnnnnnnnnnnnnnnnnnnnnnnnnnnnnnnnnnnnnnnnnnnnnnnnnnnnnnnnnnnnnnnnnnnnnnnnnnnnnnnnnnnnnnnnnnnnnnnnnnnnnnnnnnnnnnnnnnnnnnnnnnnnnnnnnnnnnnnnnnnnnnnnnnnnnnnnnnnnnnnnnnnnnnnnnntttctatctccagcgttgcctcgctttgggttttctttattgtgtctacttccccttttagttctagtatggttttgttcatttccatcacctgtttggatgtgttttcctgtttttctttaatgatttctacctgtttggctgtgctttcctgcttttctttaagggcctgtaactctttagcagtgctctcctgtaattctttaagtgacttatgaaagtccttcttgatgtcctctatcatcatcatgagaaatgtttttaaatctgggtctagattttcggttgtgttggggtgcccaggactaggtggggtgggagtgctgcattctgatgatggtgagtggtcttgatttctgttagtaggattcttacgtttgcctttcgccatctggtaatctctgaagctagctgttttagttgtcactgttaagagcttgttcttcaggtgactctgttagcttctataagcagacctggagggtagcactctccttagtttcagtgggcagagtattctctgcaggcaagctctcttcttgcagggcaggtacccagatatctggtgttcgaaccaaactcctggcagaagttgtgttccactcactagaggtcttaggatctcgtgtggaatcatgtgtgggcccttgcgggtgtcaggcgactcagctggcaaggtagcccggggctcgagtggagtggaaggggtttgtgccccatatcaagcccgggtagcctgcttccctatgtaccgcagtctcaggttcggcgcgattggattggggcaggcgctgtgttccactcaccagaggtcttaggatcccgtggggagtcccgtgtgggcccttgcgagtgttgggcaagactctgctggcaaggtagcccggggctcgagtcgagcggaaggggtgctgctacatttgtattttaaggaaattaaatcatgacaatgttttcatgttgtattaacattcttaagtattacgatttgttctgaatatttaatgtatgcctacatgacattttatgttgtttgctagtaaatacaatctggaaccttccctagttcaacaaagatactctctataaataccaaagctaaactacagcaataatcagttatagatttgacctctaaaaggtatatgataccgcccttgtttataaaatctagttgtttttaacggtgatatttagtagcatgttttaaaaattgtttttaccccctttatttttattttatttgtatgggtgttttacccacatatgtctcagcgccacatgtgtgcaatgcccacagaggccagaagagggcatcagatcctccagaactgaaattagagatggctgtgagccatgatgcaggttttgagaatggaacctgtgtccttccttcggaaggcagcccatgctcttgcatgctaagccatctctccagctcctaatcgttggagcttgaacactgttcttgcttctttcaactgtctatggctaacactgactccgcctgcatttacctggtaagacagttttatgttgtatgtgttcctcttttgcagattgcattctggacacttggatatatcctgtctcatcccgatatccacaggactgttttagaaagcatatcttctgtgtttggcactgcaggtactaaattaatttacataatcaaggacgcatggagtatgtatggtttgatcgggaatgtctgccatgttttaatcagggattcgggctggggacatggctcagttggtaagatgccactgcacaagcgtgaggacctatacttgttcattcttcagcacccacttaaaaagggggggcttcgaattgtgacacacactggtaatcccagcgcttagtgtgtaaagtcatggactattgtatgaaatattaaaaataatttgatttttttgttcaaaaagtatattattatataagatatgatgccagttaaagttgtccctccctcgcctcctgtataatggctaaaaataccattttgaaaatattttgtttggagtttttatccaaaccaaacaaacttgactgggtacctaagccctgctctggtcatgccagcctggaaggtgaacccagcagtgctatgcttttatcatgtggagatgtgagcactagaatcattgagaactagcaatgctcacagttggaatcccagaagcactctggtgaatatgagaaaaggctattggcctacacagagcttcaggtctgcagagctgatcagagatatgcaatggtacatatctgcatacgtgtaggcacgtggctgcaggtgaggatgtgcctctacaggtgagcacgagtctgcaggtgagcatgtgtctgcaggtgagcttgtgtctgcaggtggacatgtgtctgcaggtgggtgtgtgtctgcaggtgagcttgtgtctgcaggtggatgtgtgtctgcaggtgggagtgtgattgtaggtgagcgtgtatctacagacaaacaacaaacaccctgactcacacagtctgtccacatttactggagtctttcctgacataaagttctctagaatcctggcctttggagagtacaaggtcagaatgagagtggtagggataatatggagggtccaagagacctagaggtcacaactggagtgtgacattaatcttgagtgtccacagggtttgaatttggagctcttagacacagctccagtgtaaggagacagaaccctttgctccttctgtaccctgacgtattcttaaaacttgttattctctcttaacaggaaatcattccttcaaacagggtttcatggtaatagcttcactgacttccatttttaagtcattactgtagaatggaaaacaactcataaaaatgtaaaacttaaataaatatggagatggaggtagctcagggatctctgaataaataaaatagatctggaagcatctatggctaagtcatagtaatggctcagaaatttagatgtgggggaggccacaaggccatgatattgaggaagataaccatgaatctatacaaaggaagatggcaaaggaagaaaattagagtgttgctgtattatcaagtactcttcagagaaacagagccagtaagaaatggttggatagatggctagaggataggttgttacacatataattagctagatgataaatggatatatctagaaagatatttattttatacgttaaagcttatttttacttttaaacatatgactattcatgtatctgcatgtgagtataaacatgcaaaagcaggtgcccacagatgggagtcacatctcctgcagctggagttataggccgttgtgggccatctgatgtgggtcctgggagctgaccttgggtcctttgcaagagcaacagcatcagctgtgaaccacagagccatctctccagcctccagggagagagatgtgttgtgagaagtttgttgatgtgatttcagatcctgatataacagtacttgtcatgtgtgctccctgaagtcagcttggtgagtttagtggtttctttacttatactatgaatctctgtgccgctgtgtgcatgtccggtgctttcagcatcccaccagccactgagaatcctgcctttgctcctgctctctgcgtgtgcagagcctcatgggcagccccagcagggagctttcttgagtgtgagtacagccctgcacaaatgcatggccctttgcttgtataggaatacagatctcgtcagagccactacagacacctggctccctagagtttgagtttcatccttgtaatttacctgctgtttgtcccagctactgtctactgcctctggtggctgcaaagatgaatctttaaagatatttctcccagcgcccctcagaactaagatccccactttttttagaagtgtggaagacactgacagtgtttacattcttcttgtctgtcttctgggaggagagaaagacatcaacgtagtacataaataaaccgagactattagcaggcgtcaagttctatacaaaaaacacaacagagttgaatgtggacaaccaccagtgccaggatgtattgattaggccatcatgttcaaccatattggcaagatggaattgggcagggatttgaaggggtttagacaggtaggaatctagaggaagagacagcagggatgaccacactgtgtgcccacaggctctgcagttaggttaaaaaggtcttgtcatctattccacagcagaatgtataggaaatggattcagtatgtagagagaggaattcgaaggttctgtccatctccgttgaggcctttctctttcccctgagaagcatatgctctgcccccaaccccccccctttttttattaacacaagaacttgcctcgttcattttacttggccatctgctcccgagtcgtttctagaaatttctaatatgaagagcgcactgttggcagatcacagcagacactctggggagatgcatcctgtcccatccttttcctctccaccttttctgatgctgtgccgacccatgctcctttccaacctgtgacccctttcatttcccagcacctggccccgcttccttctccagatctctggctctgcttgtctctgtgtattgtcagcagggtttccagcaggatctcactcctgcacatctaggctgtttgtttgtttgtttgttttggtctcaatacatttgttaaaatgtcatgggttttccaaaagagctggacgtgctgtgccgggaaggcatagccagaaacggtggtgttcccagccaggccacagactgtctggcaatcccagtatgcccactaatgccaagcacatggtgacactggcaggggacactaaatgacattgtgtccctgggaacttcagcctgtgaattctgaaattggtggcaagcaaatcaaaatcgtagtctccttttcttcatatcattagctttttcttcccccttttctgcttcttttttattcatgtgtaaatatgtgtatgtgtccgtgtccccgtgtccgtgtgtgtgtgtgtccgtgtgtgtgtgtgtgtgtccgtgtgtgtgtgtgtgtgtgtgtgtgtgtgtgtgacgtggaaatgcatgcactgcactagtagctgtacagagaacactgcagaggccaaaggagggcgtcaggtgttctccgactagttccactgggtcactgtggcaggatctctggctgagcttggagcttgtattttctcagctagcctagaagcctgcagatctccagcatcccccatctccacctattttgctgctggcgtgacaggcatttgccggactcctggcttactttggttctgaaatccaaacttcaatccttatgcttgcacagcaagctctcttagcttagacgagtctctcccacccacagctggcaattttaaactataatgcaacggttacctgaagtctctatgtgctggccagaaacaaatgctcattccctttatcgttatttttttttaattaaagaatctacaaagtgatagttcaatgagacttggattctctgttccttttctttttcttttttaaaaaatgtatttatttaatgcatatgagcatcctttcactgacacaccagaagagggcatcagatccaattacagatggttgagagccaccatgtggttgctgggaattgaactcaggacctctggaagagcaggcagtgctcttaaccacttagccatctctccagccgcggattctctgtttcaatgaagtttcccccaaatatctatctcctgtgaagtttcacctcttctcagaagggtgtgcattgctttgccgacagaactgaagaataaaattaaattacttaactcttggctttaagttaaactatagattaaattatgtattagttattatttattcttttaaacgtacatttttgttttgctttgttttcgagatagggttttctgtgtatcccaggctagcctaggctcacctctgatttgcaggactccttccaagtgctgggagcagaggctgtaccaccagcgcggctgtcagtttgtctgagtagcttcccactcgcccaccactggggtctgctttccgcatcctggtggaacactgacgtgcatgtttcgatgcttcctgaaccatctgtttacttcaccttgcgttgtcttctccaggtagcagtgaagtaccgctggtcctcagacgcctagtcaggtcagcaggtgcacgcccgttccttggcaggccacctaaaccaacctgtgcttttaatctttaggttctgtgtgcactgtgttagaagccattttctttcttcatttaggagttcctcgctgggaatttgcccatcagcagtgcttgctcagtcttaacaacaagcagacagcgggcggataaaaattaccagagtttgattttttcccctacacactatttatgttttatttcatcaacatttttatgtattcgcttcattttataaccatggatccatgcattcacaggaccttctctttctacctataatcttattaagtgttattccacaatgagatttattgtttaattttatgattctaatttaattacaacctttccccctccaagccctcacatagcccccttcactctccttcaaattcctgacttcttcaactgttattgcatgcatatatgcatttgtgtatacatgtttatttctttattaccaagaataacttgttgagtctattccctccctgcccccggttgatttacaaggaagaggattcattaacacaaatacacctaggtaggactgatttcttttccttgaagtacaagtcataagccatgcatgcagaaatgctcacatgagggctggagagatatctccgtggttaagagccctccctgctcttacagaagtcgtgagtaccattcgcagtaccacaacagttgatccacaagttcctttcaccttctactccagggtgtgcaatgccctcttctggactctgtgggtacctgcagttcatgagcacacacccatacaccagcataagactaaaaagaaatcttaaaagaaaaaaaaaagtctgttggtttagagtcagaggtagagctgtgaattttcatccacttagtcatgaaatttgtgagtttgaaaacacaagatatcttaaccacagctaataatatttttatgcttgtttgttttgtttttcttttgggctccattgcattcagatgggacagcgatcccaatggagcgtactgacactgtagggtggcccttgacttggataataaatgtaaatgtgtctgcaaactagcaaaatccaaatgaagcccagccccaggctgactctgtaggtgacaatggtgctgccctccctggcttcattagctcagcattcctattttagtatatcccaacatttgcactaactccatctagtggtccagcatcacttgcacgctaactcagcttctctccgcttggatgcattctccctgtgctcttgccagccaataacagcattcttgaaagatgccatcattcctcttcagctgacttcataatcttactcattattcttccccagctagccagggctgataaccagagttatgattggaatggatctttttgattctttatgtgacaaattggcccaaataatgaagaaaaaagtcaagcaatagagccaagattacgctagaggagttatgattagaggagacttagtttattaaaaagtctctattcctacttgaaatttgataacctgaatctaatatggggatttagagactaatgcatatcatataggaaatctttcacagggctcattttcctttgctagcccggcctatataagctgggctgggcctaggccacaataaactacacagatgtttattgcaacaccagccctgaacactgtatctaagtatttacaaaagcaagaggtttcatctggcctaccctaaattgcatctttcccaggctaaatatgtaattttatctttttctccttagccctaaggctaaaattgtgccattttggaacacacacagactgaaaactctagcccaggactccagccatgcagacatccatgcatgataatgggctgtcttagttagggttcccactgctgtgaagatacactatggccaagacaactcttataaaggacaacatttagttggggctggcttacaggtttagaggttcagtccattattatcatggtcggaagcagggcaacgttcaggcaggcatggtgcgggaggagctgagagttctatgtcttgatcccaaggcagacaggagaagactgactctggccagacttaatcatatataggagacctcaaagcccacccccacagtgacacacttcctctaacaaagctacacctcccagtagtgccacttcctaggggaaaagcattttcaaaccaccacattccactcctggccccataggttagttcaaacacgtgagtctatgggcagggggcgggggcggggcatacttaaccatagcataatgctaaaacatttagttcaacttcagaagtcccataatctataacagtctcaacagtttgaaagtccacagttcaagggctcctctgagattcatacaatctcttaactgcaatcccttaaaaaaaatcaaaatcaaaaggcagatcatatacttccaacatcacaggatatacattgccatcctaaaatggcatagtgaagaaatagtggaccaaagcaaaacaggaaaccagctgggcaaactccaaacctctgcatctctgtgactcttcagattacaattcccttcatctttgttggctgcagcaacttcttcctgttgtgctggttccaatcgtagttagcagcttgtctcaacagatagcccatggctctgtggtctcaaccatcttggggtatccaaggtaacttcagctttatagtctcttgttccggtgtctgggatccacgcatgatcttctggcctcctctaaaggacgtgggtcacttctccagctctgccttctgtagcactctaagctctgctgactccactctactgctgctgcttttcttgttgaccattccacgaaactagtgtctccaatttgctggagtcctccactgcaactacacttcgccaatagcctctcataggctctcttcatggtgccaagcctcacatcttttgcatgacccctttagtcctgggctgtcaactgcaaatgaggccgcaccttcaccaatggccttccatgacctctcaatgtgccaaggctcagtcgttctccatgaccccttcatgcctccaaactagtgccacctgggtgactcttacacattaccacctctagcttcaacatgaggtacaatcttggctatctctcgaacacagctttctttgtgttctcagaaaacacttcccagaagatttcacctcaatgatgctggtctcgtaatcacggctaatttcttagctccagctaaccagcatcaattgtcccagtagttccttctattcttactctaaagccagagcgacacgcctgaagctgcaaagttctgctgcttgctggggctggaccatggcccccttggtctagtgtattatcatcagcattccattttccaactccttcactgcctagcctggaacttactctatagatggaccttgaactcagagatctgtgtgactctgtgtcctgaattctggatttgaagtcatataccaccaggcctagatctaagatttttgctacttgggactttctctttcctagcctgaccttgaactcagacatctgcttgcttctgtctcctggggattaaggatgtataccaccatgcttggacctgagctttttatggccacaattcttcacggcctggatcaaaaaccgatgtcctccgtttctggattatggttcattccatattaaaagtccagataaaaacaataacatgcttacacacacacatacaaatacaccatatgcattcattaacatggagaattaagtgtaaaatactaacattttattcactgggctttttttttttaagggaaattgctataaaacttaggaactagatttctaggctcagctttcataggaatcactgccaggtgttgtgacaccagctcctgcttttcagaggttatgtcacgtgattttactgccagccgctgttcttcatggacactaaccttaatgcacacacttcaactttaactgtcttaagcaagatggcctgtgaatatagaatgtttgcctctgtgcaggagagcaaacagaagtgagcgcccaggatttcgaaagtcaagaaggaacgtgtgggctgtgtcagaatgggagctttaactttccaggggatttgctttgtgcttttcttcttccttccccttctcttgaaagtacagtgacgcctgccctagaatacagagagcctggaacaggggaataccccactgccctacctctcacaaccttctttctaattatctcttcaaattggatgattcagagctgtccaccattttccccaccttctgccgaaacacaggctcttttccacagttattagtcaggctcttacagactgttattccagtgtacaattggggttcccttttggggaactgataaaaggaatttaaaaacagaatcagaaaaaaacattgaggaatatcttttattagttggagaggagcccagcaggcaagctttatagaagccatggcaacagctgagaggaggaagatgggtaagaggaaggaattatgttctgtatcctgggctctggttggcaggggagcttggcagatgaagggagctgtaaaagctgcagggagttgaaagcaagagttgtgaacgcacacagtgtcaaggaaagtgcactgaggatttgggccagtctctgagaaacagagagaaagaagggggaaaagtattcatgtgcacacttagcaacaaagtgttggatctgacttcctgagggaagaaggctgggtgggggggagtaaagattatttctccttaagaggtaattattcctcccattccattggcttgtcttccagtgaatcatttattgttgttgttgtgttgtgttgtgttgtgttttgttttgttgtgttttgttttgttggcccggtctcctggccaggtgattgacaggtgttaaaagagcttcaagcaaaagaaacaatggtatgtaaagtctagtctttgagatggatcagaatggcaagtctccacctggatccattcgtttttttttttttgttttgttttgttttgttttgttttttttgttttgactaataggcgttagattttcttcactaggcctcttgaaagcccactttttcacgggatattttcaaatttaaggagggaaaatgtgatgcttccttttctcctgttaccagggaaacaggaggttaatgtactccaagacgactgacgtctgtctgtctgtttagctacctaatattaggactaaagaaacatttcttgtacgtatttttaatatatgtacatgtatctgtttgggtgaggaaaggggcttaaaatatatttaaaaaaaaaagaagaagaagaaagaaagcagtggaattgtcccaaagtcctcttttggtgttctggctgactcacgattcttcttaagcccaagaaattagagtttcatgatttattttagaatctgttccttttctttctgcctgggtgacacctacccacccttctaggcttatatgaattccagccacaagcgataggagatgaattccacggatgcctgaatcctctgctctgagacttgtattatagttatttatatcctcataaattgtcttgtgctcttgtgcccaggatcctttaaggctatggcttttgtcatttttgactcagtgctcttcttgggaaaagtgtgtggtattagcatgtgtgtggcttcttgttagccttaaaggctgttgtaataccgtcaacacgtctccctttattggaagagagtatcagagtacttatgatgtcgcacatacagatgtgtaaacagtatcagagttgttccagacggtcttcacttttgcaaaagaatggatgtgtaatgacccaaaccaggagagcaagtgcatgtggttggtaaggtcacttaggttgtattctaatgcagggtgggacctatggctcactctattgttgagagcttgatctcacagtctgatgaaattgactaatttgcaatcatcaggaaggggaagggtgtgatacagagtgaagtttcaggaacatcttgttgtctggggtttaagcaaaaaagtacatacatgagagtttcactagatggaagagggttataaaagactggcctttgtgcaccctggccatctttgatggaaaagcctgtcccaccgttggacacattaacttgtctgagactggagcattggagtatatgaagcgctataatatatttttgatgataagtagccaatctattatgaatattgcttcagctcctgtagcatttggttaggctacatataacatagatatgttgtgagtgttcaatgtcagaagcacatagttgtgtttgtgtctttgctcaatgccagaagagttgactaacaataggttacagggcataccaatttcatggtagcactttgctagacattccctttttccttggtaatcttggcttaggtgagcaggattcactttcactccagtcttaattactaataatattctcagagcacacattacattccacacaattgtctatatcatccgtatctatagatatctatatctatacacatatttatttatattcatgtagaggtttcagaatgcccaccacagaatgcaaggcgtttcggaagtctggagaagctaggaagctagtcgaccatcactagaaagagaggcccattggacatgcaaactttatatgccccagtacaggagaacgccagggtcaaaaagtgggagtgggtgggtagaggagtggggggggtatgggggacttttgggatagcattagaaatgtaaatgaggaaaatacctaataaaaaaaaagaaatctagctagagtctgtactgctgagatgacatgtgaacggaacagggctgttgggagttagctgttcttatgggtcagcctcctgcagctctctcgggctggatgtgaaactgcatggttggattcaacctctgagctatcagaactagttccagatgaaagaatgggcagacagatgggtcacctgctggtctagacagacaaacagaagggtgggctgtctgaacagtgagggcagagctaagctgaagccctggaagcagttgggagttctctaactattgtccttgttatgggtggtcacatgacaagtaggtggggccaagtgtgcatggttctatgtgccagttcttaatgaggtctaggtgagagagttgtatcctttccttggtctggtgtgtccggcaagttcttggacctcgtttccttatgaattttaatatgttcacctgacccaatagcctcagttcacctcagtaaatttgtagcgtatggtggtttgaaatagcacagtgcccataggctcctgtgtttgaatacttggtccttggttgatagaactgtttgggaaggattaggaggtgtggtcttattggaggatgtggacttatcattggcagtggactttaagctttcaaaagtttcatgccatttctttgccttccacttgtggatccagatgtgagttctcagctgttttgtgatgcacatccttgttctgctaccatgaactctggtcatctggaaccacagttcctaggtaaccccccccccctcctgtaagtccctgcaatcatggtattatatcagaaataacccagggatggttatgtatgtcaaaatgtctgaaaaaaaaatgagtattttataaaatgtgatgtaaatttgggcagggcacagacttatctcagaagatacatagcacatctgtagtgtgttagtaactgaaataacaactttaaaatctgccatttatacataacaaatatagtttacagccttcatgtaattatgacttttatgtaataactaaatagatgcattagaaatgtctgtttttctttctttcttcctttcatttttactctctgagtatgagaatcatcctttattttatttggttttaaatatccaaaggtttgatttgattgcatttatgccaagagttaaacagacggtttctaaattttgcctgagatttctccttgactccttccctgggctctctggagtggtctccgttgggctccagcccttctggtgattaccttggaattctcccaagtgggctttctaaatttagagccacaggactggactaacacgccacagatgagcccagaaatcccaacagtaagggtgcaaacacagccatttttgagaggtttaaccaaaatgatgtcttagcagaaagatgtttgaaaacagaatgtttcttttatttctcttgtcttgtccaggcatgctgcacatcaagctggggtttgagaaactaaaagtctacaattaaaatgcttgttttccacatcatgtgcacagttgcacaccacagctttagccatttttcattagaaagaagctttcagtgctacattatgtgatgtgatgtaaaatgtttctacaatgaaaatagtctaatagcaacacttaagattaaaaacttgttttcttttctttcttaattctctaaatttcactatgaccaagttcaaactccaaggtcagaaacatgccatgtgttagagcagggagatgtggtagttattgttttctcattgctgtgacagaatattagacaaaagcactttcaatgaggaaggatttattctgcatgaggtttgaagggatcagcccagcatggcaggaaaagccgggtagcagaccctcaaagtggctggtcgcatcgtgtctgcagtcaggaagcagggagagatgaacactggagcgcagctggtttccttttttcgcccttttcgtttggtctgaaagtccagtccctggaatgacacccacattgaggacgtgcctttcttccttggttaaacctctgtggaagtgctgtcccagttgggcccagtgcagtgtctcctgtcagggtatacaatgaagatgaaccaccagagtggttgccactagaagctatcccttctggtttggagcgttaatccctgactagtggtcatcacctacctttagtagaaaaatatttattatctgctatactatagcaatagtgaactaaacaacagtgaaaaaaagaaggagtgtttggtgaatttgttcaaatctatttttttttttttttgagacagggtttatctgtatagccctagctgtcctggaactcactttgtagaccaggctggcctcgaactcagaaatccgcctgcctctgcctcccaagtgctgggattaaaggtgtttgccaccaccgcccggctcaaatctaatttctatcaagttatcttaggagaaaccagtcttctgcagaaatccgcttcaggatcctactcaagaggatcctgctaacttgttgcagtatctgtctgtttacacactcagaggatcctgctaacttgttgcagtatgtctgcttattaaggaccctagctgactaggtcttccatggctttcaggatcaaggaaaaacaggtctaacgcctatctctggtctctgatttctagaattggtcatcagcatcccctgtttcaatttgccatggccataggctactggctgagccttagctccacagccagtgactgacaaccttatagtgaggcagaatctctggcagccgagacctttcattataagcttccagccacagtgtagctgtgattttcccttgtctcatgcttttaaggttttggtaaagtcaactgacacaaagagttggtgctttcaacagccgtgatctgggtggcatgtactaaggtagctcagtgcagaaaaggaggcaggatgtacaaatggcagagagcagatgttgagaagaccagtccaggatccagggctcaggtacagtgggacactgccatctcctgctgcctctcccaggctctttctctttctagaaatagccagctgccacctcttcaggcatattgcagcaggtccaataccttttcctttctgctatctcccccacccttttacaggctttctatagacaggtgttcatttcttattccataccatccaaggacttcccttcctttctttcctccctcatgttcttttcccttcattacatcgtagaatttttgtctctccccccctcctctttcaggttgatgtagatcactccaggctgtctgtgttttcttgttccgtgtaaaatattgagatgccagaagttgcaggcatttggttcattccgttattaaaactggctgacctattatcgagttccaaaagccagtgctcactatcaaagtcttcaaccaagctagctcatttctaatggaaataatgtgtttctatgacttttcaattcccataggtgggtatgatccacatctcacatgcagttgaattccttgagtcacgtaggaagacatgcatgggattagatgggtggttcttgagcaagtctggtttgcaaacaggcagaaaggcgcacgtctgctatcgagattttttttttcctcaatgctttccttgaatcccaagcgattttccccttaggcaccatatgttacccatttgccattttctgtctggtacccgggagatgtttgtaccccagggaaaacagagccaactgaaaaacaggatggctgagaggaagcactctctctgtggtaaggaaatggctactgtggggcgggggtggggtggggtgggggagggagatctcaacttcttagctctcatttagaaaagagaacacatagaaaccaaatgccaggaaacggatttcccaacacatctgctggcacgcgctctctgagcacgtaagcctaagcatcgcagcaaacattctagataagtgtattctcccctggtcatggagtctatattgtcttaatgaaatgtattttatggggttattaaaagagtacactaggcctcgtacacttgacctggaaatagaagtggtaagggcagtgaagaccacacaggatttatctcacttgtaaactcaggagctgggatacagcctgaccttttgagcaaacccaataatagctcattctcctcctgtcccgtgcacaggagtaaactttttccatgctaggtcttgtattttagattttatggaccataaaaatctctgctgtggccttctctggcctgccgttgtagtggaaaaccagccacagatgagtgtggatgtttttattggaaggtaaaactttatagaataaagcagtaagctggatctgacctgctgtcatagttaatgagccacacccttaactgtggcttcatgagagagagagagagagagagagagagagagagagagagagagacagagagagagacagagagagacaaagaaacaaagaggtaggtagttgggtatataggtaagatacatagatagatagatagatagatagatagatagatagatagatagatagatagatagatacatagatacatagatacatagatacatagatagatacatagatagatacatagatagatacatagatagatacatagatagatagatagatagatagatagatagatagatagatagatagatggatggatggatggatggatggatggatggatggatggatggatggatggatgggtggataggtggatagatagatagatagatagatagatagatagatagatagatagatagagtggacagacacatagacagacatagttaggtagataggtaggtagtaggtatgtaggcaggtgggtgggtaggtacataaactcagccagtggcctcctaggcaccactgcttagaggcagctgacacctttgtagttataaaaaatgataaaatggtaagatggcttacagggtaactgctccaaagtctaaagacccaagtattaagcccaggacctcaatacaaattaaaatgaaattctaaaatgagtgaactttctgaattaagatttgtcagactcagaaaaggcatggcctggttttatggctcatcctaggaactaaaagtcctttcttacacattgatggcaatcgaagcgaggtgagtgatgtttgccgacaacacgtgcacttgggatttctgccctcgactataatttcaatcaaaattttcaccccttaggtttatttccctctgtttttaaagaggagtggtaattttaaaattagtatagtaataagagcagctttcaaacgagaatatttaataaataaggtacaagaggatcatttgtctgttcactgatttactgaactgggaattgaacccagggcctttgacatgtaggtcagtgctctcccactgagggatatacacagttcccttctttttcttttatctgccactgtgttttgttttgtttttccttaaactgtggtccccagagcaggagtgtgggataactggagattttcctagaactgtcaattcttgggtccactttatacaaagatttatcaaactctatttcacttaaacattcactgccccacccccacccccacaattctgcctcagaattgtcactaaatctttcccctcacatacacacaagctagtgctttgtcaaactggtcctctcttccactgtttcaaacaccagttcattggtccattcatttatcccaccaataataatatacaggatgcttcccatgcataaggcattgtgttaggtcataaatatactaaataaacgagattcagaaggaaatgaaatgttaatgcacttggggaaccccatgataaaaatatgagctgaattatttcctgcatctaaccaatggagatagcatggcatggcgctgagtcaggagagaactggggtagttgggcaaaggttcccttgggggatgctttgcctgtggcctgaagagtgagtggcagccagtttttcaaacagttgcaaagggcagagggaaccataatggtgggtaacatttgctgagtccttgctgtttggcagctgtgattctgggagatttacattcacgtttaccaccctgacaacaactgtgtctatctataaggtagatacagtcaacgttacagttttatagtttgtaaggcagctgagtcaggcgtcggtaatgcagcaaagctcacagtgtctccaagattccatgtggagtgcaatgagagggataagtagactgcatttgccagatggaaaaacacttgcattagcttcctacaccaggacattttatatttctcctcagacaccaactggacgatgcagagcttaattcagttctgatactgtgggggagccctgctaattaaggtcgaagtctgccatgactggatagcttctctgagttccgtgcaaaatggaggcccctttccagcagggctttctcttctctgaccttgtctggtgagccaaaaaccccacaccctctactgggggaaggtcaaatagtctttggtagacctacaagtccaacttcctgttcccctcagccccgccaagaagctgcccagcaactatgtgggattcctggcatacctctctgtgcaaatgaggcattcccagaactttaaaactctagccaatgattttcatttactctgaaaacttggtcccattctccaagacccatatacacccatgcttcaccccaaataaagtgcatgtgtacaaacccaccccaataaaggtatgagcacagctaagattgtctaagagagctgtttcattgaagaccattggagaaggccttcctctacaagagatgtaacactaaggtccttggagaaggccctctttcccacccccaccccccagtccccatccttctgaaattcccagcagtgtctggataccctgagagggaggaagaaagcagaggactcagcagactcagaaccacagttggtcccccaccacacataccacaaatacttgctccctagacttagtgctgaccctgaaagttcagggctcaaccccacagtgccacccctgttttaactaaccatcaaaagtcgtaggccccacacatcattcatactctatcttagctgcaaattgggagtttctacagccgccttcaagcttcagtgatttgccctaataactcacaaaagttcagagaaacacttgtctggctacatgtctgctttgcctgtgccccactgactccccccaccttctttttttttaattaggtattttcctcatttacattttcaatgctatcccaaaggtcccccatacccaccccccccaatcccctatccacccactccccctttttggccctggcgttcccctgtactggggcatataaagtttgcaagtccaatgggcctctctttgcagtgatggccgactaggacatcttttgatacatatgcagctaaagacaagagctcccgggtactggttagttcataatgttgttccacctatagggttgcagttccctatagctccttgggtaatttctctagctcctccattaggggccgtgtgacccatccaatagctgactgtgatcatccacttctgtgtttgctaggccccggcatagtctcacaagagagagctataactgggtcctttcagcgaaatcttgctagtgtatgcaatggtgtcagcatttggaagctgattatgggatggttccctgcatatggcagtcactagatggtccatccttttgtcacagctccaaattttgtctctgtaactccttctatgggtgttttgttcccatttctaagaaagggtaaagtgtccacactttggtcttcgttcttcttgaatttcatgcgtttgacaagttgtatcttatatcttgggtatcctaagtttctgggctattatccacttatcagtgagtacatattgtgcgagttcctttgtgattgggttacttcactcaggatgataccctccaggtccatccatttgcctaggaatttcatagattcatttttttaaatagctgagtagtattccattgtgtaaatgtaccacattttctgtatccattcctctgttgaggggcatctgggttcttttcagcttctggctattataaacaaggctgctatgaacatagtggagcatgtgttcttcttaccggttgggacatcttctggatatatgcccaggagaggtattgcgggatcctccggtagtactatgtccaattttctgaggaacctccagactgatttccagagtggttgtacaagcttgcaatcccaccaacaatggaggagtgttcccctttctccacatcctcgccaacatctgctgtcacctgagtttttgatcttagccattctgactggagtgaagtggaatctccgaatggcagagaaacacctgaaaaaatgttcagcatccttaatcatcagggaaatgcaaatcaaaacaacactgagattccccccaccttcttaagaaacagcaagggctgggatagatgctgtggttctcagtctcctttctactcagacaccgatggagaccacaaagagttaagatgggtggtctgagggtccgcctttccgctatacaccaggcaagaagggaatggctgagcccaggacagaacagaatctggtttagttccgagtgatttccaagagtaccaagtggctgaaagagaaaaggctttctccgggtgatttaggtgcctctctttttgacaaaggcctccccctccctccaggcaatccttgataaaggagatggtccttgcttgtccaaactgctttatttttatggcagatgtgaatgcatatatcttacagagtaaaccagggattaaataccttttgtaagaaagtatgccccaaaagggaagctcattggctaaaaactcggggcctagaaacctcaatagcatggagaagtctagggttttagtgggggttcagtgttcctcactgtgctctgagaagctatggactcctatagcagaaccaggggggtggggacaagctgggcttagggaagtggttaagacataatgaggatagggagatggctcagcaggtaagatgcccagtgcacaagtgggatgacccaagcgggctgcccacaacccacgagagaagtccagcatggacaaacatatctgactgtaactccagtgctggggctgcggtggagacagatggatccagggaccctctgcctgtgctaagctgcaagtttagtgagagactcaaaaatacagtggagagcagtaaagatacctcacatcagcctctggccaccacagacaagcaggtgaatacatgtgcacacacacacacacacacacacacacacacacacacactgagagacggagacacagagagagagacacacagagacagaaagacagagacatggacacacttgtgcacatacacatttacacagaaacacacacacacacacacacacacacacacactgagagacggagacacagagagagagacacacagagacagaaagacagagacatggacacacttgtgcacatacacatttacacagaaacacacacacacacacacacacacacacactgagagacagagacacagagagagacacacacagagacagaaagacagagacatggacacacttgcgcacatacacatttacacagaaacacacacacacacacacacacacacacacacagagcacttgatgcttttctgagggaaatgagcctgttaccgtgatctctgacagcagctgaatttttgtcttgagacaggctctccttatgtagcaccacatggcctggaacttaatatatggaccaggtttccctcagacacacaaccacctgcctctgtctcctgggcaatgggattaaagacctgtgtcccgtatcctgatccacggatgttttaaatcagcttttctgatgctgcagataaataagagggccgatttaaaggtgtaaagacttcttttagttcagggttccttagaatttgcccatggttggctggctccttgtctctggtcctgtggggaaacaaacggaaatggatctggggattcactgggtaaatggatcgtggcgacttactaagtaagtgctgtcaagaccagatgggaagcagtgatattctaagtacttttcaagaaatgcacattttccttgaaatattcaccattaagttgtgtaagttgactgaaaattcatgatcgtgtgtaaggtggcataaagaccaacctctgatccgtctttaggtgtcattatctattcactgtaggaaggcttggcatgagtgtgctgaaagggtgtgctcttcattccagagggagcaatgaccctggcttaggtcttcgataataaatagattgaataggaagataagggctatgcttggtggcccttgggttcagctgaaccaatcagaaggatgaaactagaggatcacaagtccaagggcagagggatttatagtgagatctgctgtccaattaccaaatctaaaacaggtcattttaatatcatatggtgtgcatgtgtgtgtgtttcttttaaaattgcatttttgtgatgttttcagacacaaatatctctctatatacttcattcttatttaagtttttactactcttacccatctgacctcttctggtgctgaccccttaccatgcattaattacattccactactctctcttgttctccttctaaagtctatcttccctctcctagttcctatctactgtcatagcatatatacatgctcatagatacacttaaatgtagattttgcataagagaaaacaagccatatatttcttttacagtctgcattattttacatagcataatgatatccagtcctttaaaaagatttatttattgtatgtgtatgggtatttgcctgcatgaatctatatgtgctatatgaatacctcatgccagaagagaatgttcagtctgcctggaattgaagtcatgggtagttgtgagtgctgtgaaccaaacccaggccctcttcatgagcaagaagttctattagctgctgagacatcttatcaactccagtgatctcctcttgtttctattttccagtgaattccatttcattcctctgtacactggataaaattccatcgtgtgtatgtaccacattttctttatcctatgaataactgcctaggttatttctgtatcttgaccattgtgaacagagcactaacaaacgtggacatacaaatatcttcatggtgttctggcttatagagttccttgggaatgtacccaggagtcacatagctgcatcagatggtagtttctgttttagtttcatcagaactttcaatactgatctctgtagtggctgcaccagtacactgtcccaccaacagtgtgtaagggctctccttactctatatccatgccaggatttgttctcattaacttgtttgttagtagccatttttcctggactgtgacgtgtatgtgtattatatgggtatgtgagagcataaagagaggtgctgtttatcttccacagttagacttactttacaatatgatgatctccagaacttaaaaaaaaagaacagtttatttatagggtttgagtgttttacctgcatgtgtgtatgtgcaccatggcatgcagtgcctatggtggccaaaagagggcagcagaatacctggaccattctgtacatctgcttgtggaggccagaggtggatggtgggtgtctcctacgattgctttttctgccttgatttttgagacagggtatctcagctgacctggagctcactgattcagctaggctggctggcctgcaagccccagggaccctccagctctacccacctagctttttccataggtgctggagatctgaacacaggttcccatgcttgtgtggcaagtttttaccaattgagccatctcccagcccctttaagaaaatgttgcgccgggcatggtggcgcacacctttgatcccagcacttgggaggcagaggcaggcggatttctgagttcgaggccagcctggtctacaaagtgagttccaggacagccagggatacacagagaaaccctgtctcgaaacaccccccccaaaaaaaatttaaaaaagaaaagaaaatgttgcttgtgttccccagtggctaagcatgcccggcactttttggaaacatttactttcctggcctgttttatttcctttgtactgctatttctttaaacacaatgaggattttgacaaggaagagtgaagtgcagaaaaactaaacccttttccacacagggaccctcttagctatcctgtagccacaggactcttccagctaggttggacgccagtccatcttgtcagagaaagcagcaaaatcaatacatcgcagcggcgctttccttgtcggtgagcttatcctgcattgactagcctgcgtgaatctaccttctggtctctctagcgcatctcttctttaatctttaaaatctctttacaggtaaagacaagattaaagtgtctgaagatgacctgaagaagcttctaataattaagtggtgcattctggaatctgtccgcttgagagcccctggtgtcattactagaaaggtagtgaagccagttaaaattctggtaagtactggttttgttgggaaaataataaactttctagaaaaagtatgtgttttgttcggacgtattctagattgttttcttcattttattgtaattgcatataaattatatatatatactatacagcatgctttgaaatatgcgtacattttgtaatggccaaataaagccattaatctgtatattgtttcacacacttaatcaattcttgtgcgaaaatatttctgcactctagcagagttactacactgtctctaacgttagggactacagggtgtaccatagctctttaacttactctaccgctgaaatggaattctgtattatttgaccagtattcctcaaatctctggcctaccttccagccctcagcaactatatccccaagctctacttctgggagatgacgtttgcgtctgagatcatcatgttcttgtctctccatgcctggcttctctgtctttaagcatcttctgtactgttgcagaatcccaatcttttaaaaggcggaatggtatttcacagtgcacattcatattgtattctctccattcatctgtagacaggcatgcttggttctgtgtcacggtccccagaaagcatgctgcagtagatacgaacatgcagttatccttatgacatgttaatttcacatcctttggctataaactcagtagctggatagcttgattccacattaaacctactattaaacttttgaggaacctccatatcattttctacataactgtactaacatatattccaaaacaatagtctccaagcactcccttttgtctttgttctctgacacttctgggtgttttgtttgtttgttttattggatattttatttattgacatttcaaatgttatcccctttcctggtccccccccgaaacctcctatcccacccccctccccgtgcttctatgagggtattcgcccaccctctcacctactcccacctccctacctggaagctgttgtttaggcagttgtaagttgcacagtgtgggtgctgggaagcaaactagggtcctgcagaagtgcaaggagcaccccaaaatgctgagtcatctctcctgccagccttttggatcttcctttaagaaatgtctatttagatctttgcctgctttttaagtccagttttgtccttactgtggagttgctggagctgcctgtattgggaacatgagccttttatcagatgcatggttcgtaaccatcatatcctagctggcacggcatctgctcacttagctgagcctccttagttgtacagaaggatttacgtttagagtaatcccatttgtctgactttacatttgttgtccgagcttttgggttcctcgaatcctcatttaccaggtcgatatctgggaggcttccctctgttttgttctgtcttacactgtcaagtttaatccatttgagttatttttatatagtgtatgaggtaaaaacacactttctttcttctgcatataaatatcctatgatccctgcactgttgattaagaagctgacatctacccactggatagtcttggcacctttataaacattagttcagcgtaaatgagtagatttactatagggctctcgattctactctattggtttgtgtgtctggtcttgtgccagtttgattcctgtacatggttagtacctttcaggtcatgtgatgccctgtctccagctttgttaatttcagtcaatactgctttggctatgtggggcccctgtgattccatgtaaaggctaagtttccacttttccaatggaaagtgttactggcattttggtagcttatattagtgtatgaatcctttagttcccttgggtactaagtgaccctagaacagtttgacacactaagttaagtagcaccatctcattgagagatttggtttttttggggggggaaatattttagctaaggcataatctttcatgcagaaatctggctgtgcgatcctatattagaattacgtaatgttgtttacatcgagcaggtgggctcctgtcagatgactcagcatgtcttgctctttttaatactttatttatttttgagaacttttatatatgtgtatgattcatgcctatgtacacatttatcccctcttccagctcctgtaagatccctttccaagtcccccttcaaacatggtgtcctcattttgtacttaacacccactgaatctagttagtgttgttcatacagacccgaatgtccatatcctaaagaaagtggactctgccttccctagctgccatcagctgtacatggctcctcagctaggggtgggaatttatgtttcacccccattgtgttggcttgatccagtgcaggactttgctggatcctgctatttagaagatccagggcctccagttctggacagctcttgtgaacttagtgcaagatggaggactctcttttcttatcagggctttctcttctctgcaaggtctggggagcccatccctcatatcctctatctttgaaatgtcaggtagccttggtaagattacaggttcagctttcttcctcctgataagaactgtctagcaagcccctagtcttcctggaatgccttcatgcaaatgaagcattctttggtaccctaaactctagccaatgatacacacacatgccctagaaatccctaccctcttcctaaaaacaatatagtcattgattcatctcaataaagtcgagctgcctccctgatcctggcagtagtttccattgtactcacgggccatctaaaccctgcccttcaattctgctccccttgtcctctcaggatggtggccaacagcccctggggagaagggatgttcacaggttgaagggatgttgagcaggtaacacagtattctggggcagaatatgtcgctctctgttccttgacattccctgagcctcagagaagttgaatagaagttgtcctacatagggtttccatctctgtgaagagacaccatgaccatagcagctcttataaaggacagtatttaattggggctggcttacaggttcagaggttcagtttattatcattaaggcaggaagcatagcagcatgaaagcagtcgtggtactggaaaaggagctgagagtgctactgtcttgttcctaagggaaccaggagaagactgacttccaggcaacttagaggagagtctcaaagcccacctcccacagtgacactcttcctccaacaaggccacacctccttatagtgccacactccctgagccaagcatatccaaactaccacagagatgtaccactgctgggcatgcactccactgatgactgttttggggcataagtcagtttggaatggggatgacaaggtagtgaggacaggattggggcaggatggggaggattctccaggttacaatgtgaagtctgtgcacgcggccaatggcatggcatagtaaaatattagggaatcattgaccagaagcaagatttcacaagaatggtttgcctcaagggcctgcactgcccaaggcgagcacatgggttccctctgctctcttgcttttctttttcatacctagtttgagagtttggggattgattgataccaggggatttgggtagaacacaaaagaaataaaaatcccagtttgtaaccattaaagtgtgtgtaccccctgcaaagacaaagttagtttcactgatcttacataaattacggcattttgtcttattgggatttagattaattttacttttaattaatctattgattactttaagctgcaaatggactttgagaggaaatggtctacttgttacaatgaagcagagatatgtgtgtgttcctctgaatgttgctataatcctgattgagcgtccattaattaccatttgtattctggttaaaaataagtatcagagccgggcgtagtggcgcacacctttaatctcagcactcgggaggcagaagcaggtggagttctgagttcgagacaagcctgatctacaaagtgagttccaggacagccagggctacacagagaaaccctgcctcgaaaaaccaaaaagaaaaaaaccaaccaaacaaaaagatatccccacttacacttacacttacacttacacatacacttacacatacagatgcacttacacatacacatatacatatatgtgtgtgtatacatatatatacatatatctgactgcagatgccccactggttacactatctcctatatattcaggaagttatggctaggacactgtaggacactgaccactgaagggagcacaactgttcagccactctgtcctgcaaagcagcagttccttaaagcatcccctgtgcatacagatatctgcattctgttgctgtctaaattgagaaaggatgaaacctactcatatacctttaggatgtatgctaatatttcccaaaaatctcagggcaggatgagagagagaggtatatagtgaccactctattacagtgccagggaaaagagaaagacagacagacaagcacacacgcatacgtgcacacacatgtacatgaatacacacatacacataaatacacacacatatgcatctgtacacatgtgtacatgcacacacatgggtggacacatgcacatgcagagaaaggaagagaaggaggggaagggggagggaggaaggagagtgagaatatgacctagccaggaaacttagttattttctcacacttattataaatgtctctctttttcacagtgtagttgtagctttgtttttaatgactaaacctctccctaaaatgtatttcaaaataaattatttaaagctgatttttctgttttagaatcacacagttccttctggtgatctgctgatgttgtctccattctggctacacagaaatccaaaatattttcctgaacctgagtcattcaaacctgtaagttctctctctcaacatatattattttttattatttctatgtttcttgccaaaaatatgaatgcataaattaactgaatctgtatcagcaagcagccatatttttctagtaactgtgcccagaattgccgacgacagaccggtaggatttcgaatgtagatgtctcaacatttacagatcggatagaggagtgtggaaagagcatcctcggagatgaatttttatataaaaccaggaaagagcattaaagtcaatgcccttgcttctgctggaagtcttattttatattcctttggcaaccatttctgttattggtttccaaggagcccacaaaataaaaacacagcaatttaaaacggtgatcggttacttcatgtgcttggggagtgacagggctgagcagtcccaagagttcacctaattcatgcctggcctttgagtaagtctgggagtcctggcacctagatgtatccattccacatcccaggcttcctccagccttcagctctgtcagcatctcgttactagattaattattatgagtaatctcgtgataaagcccgaggcctgtgtataaatgctttcctcttcttacgttgattttggaggtgatttacgttgtcatttacatttgccacttaataggattcttcttaagcctttcttgtttataagttcgcgttccaaaaccacaattgtgtctgatattaataacaggctgggggaaaaaaatgacccacaagtctacaactttgtatgcaaggattagctgtccagcatcatttttagttcagagaagtagagttaagcttatttatataaggctgataaaaaaaaagtgttttcttcccacaggaacgctggaaagaggcaaatttagataagtacattttcttggactacttcatggcatttggaggtgggaagttccagtgtcctggaaggttagtgtcccagctgaacggcgtcggtgcagacgatgtggaagagacagatgctcaggggacactcaccatccatccctttattatccaattacagggaaaaccaggagggcacagtttgttcatttggtcagtgctggcataggatgtctttgtgggagtgtctgtggtgacttctcatgagaagacactatacttgctagtgccagaggatattggggcttccatggttcacacatgggcagtctgaagcactgcccacctgcctgtgggcatatatgtcatcgaaggggtatgtgatgcacgcgtgcaggtgcctatgtatgtgtgtgtatgtggaaggaggatgccagcttaggtgtagtctcttaggaacttctcatattttctttggatctttcactggtctgcaactggccaagcagcttatgctggcagcccagtgagctccagggctctgtccatgcccgcctcctcagcaccaggattaaaggtgcatattatataccagatacccatttatatactgtatatatgctatctgctcatttatataggataaatgcgtgccacctgtttcacggggagagtttaaacagtgcaccagcaccagcaaaactcatctcttccatatcccattatttccatattagaaaacaagttcactagagagagaaagatttatgttactttcaaatttacatctatgagtgtctgtgtgcgcgtctgtgcatgtgtaggtaggtacccacagaggccagaagaaggcatcggagcctacagaactggtgttatcagtagatgtgacctggtgatgtgggtgcttgaacttgtgtcctttgcaagagcagtgtgttctcttggctgctaagccatcttctccggccccccaaaaagcagttcctaaacaaatggagacgttcaccatctttctcatgctgtaagtgcatcctcggtgcagtgcttctgaaagcaggacatgcaagtctcttacataaacagatactcaatagtgacctcttagagtcatcatctttggctctgagcatgataattaaaaccaaggactgcagcattgacatggaagcatgaggcatggggcagtggtggacaatttcctgatgagtattatttccaagaagaacaatcgtcaccctccccgacagcttttaaggctgagagacatctttcagtatgaaggtaatgggtaccataaaggaccctgaaactgtaactcaatcattagtgccgtatttgaacaaaaactgtactttcagaatctattgagttcttcctgtatgaaaagcagtgtcctgtgtacctcaaaggaattggatatgagagaaccatatccccaactgccatgaggtaaacaccttgtgttgacaaggaagacatgggattcatacattgcctcaaggaatggagaataacaatgtctgatatgctgctgaagcttcaagatagttggtgtaactggttaggagcatcttgctgatctcacaggaaaagtgtcctttgaaggaaacagaactttttataggctaagaaagccaaatgagcaaaagtgatactggtacagagaagctctgagctgatggtcttactgaatttaggctggattggatcaggatgggttaaaggaaaaggttggctgtgaagattggcttggtgcattggcttatcttggttgtcagcgtgacacatctgggatgtgtcaaagaggaatcgcctccatcagattgtcctgtgactttttttttttttttttgtgattgctgatcaatatgggaaggcccagcccgctgttggctgtgctctccctaggcagatgggtctgggctgtctaagaaaggtagctgaataagccatggggagcaagtcattaagcactagttctttatggtctctgctcccaggctccatgccttaagaacctgccttgacatccatccctcagtgaccaactgtaatctgtaggatgaagtaagctctttcccaagttgcctctagaaatcaaaattaggatgctttgaatatacatggctgtcatagatggtgaacctagctaaagtaggcacaggagggagtttggaggcaatatattaaccattcctttgggaattctgagtatgaaatgtggcaaaacaccatataaccagactttataggttgaatacatatgttgactatgcttcccctgtttttaaaaatctcattaagtctagttttctactaagtttctgtttcaaaatatcttttcccctccatgtcccttattttaatccagcaactcacgaaacattttgttttttaaattgttcaggcaagcaaatgacttcatttgggcaacagtacaccaagagagctttctcctagaaatttaatcctatgaatccttcgtataaacaccagcaaatgacacccattcctaattggtatagcaggggccaacttattttctcatgcccaaaacactcagtgagtcaaagaaagttgcctccagtgtagctgaccgtcgcagttcatcataaacacatacttgcatggtgttgcagctgctgttttctggagtatatgccattgtgggggggggggggggggggaggggcgtcccaagagagtaacagacatttctgggtaaacagaaaattttgctgatatatttggtacagccacaaaataactaacaggcacaatgacagagctgcagcacctctttgaaaaattctaaagggatttgcagaggaaccctttctaggcactgccccatagcatcataggaagaggagaaaggaagggtctatcatatagccagtctctacaggttgaatacaaatgttgactctgtcagacttaattttttaaaaaaatatcactacctttaaaaatatcactaattaaaatgttcacttaattctattactaataaagttccaggcttccatacatgaacaaggaagaggaagcagtgtgagctatcagactgcttcataaatactaagatccaaaatggagagccctatcatagcacacaggctcatcttgagctaggagattcaagtgaaggagaaggatgggatttcttgttgagaattgttcttgcatggggctctctgggagctggtgatcttacaagggaacatgctttctctatttgctggctttacctggtgctcacatttacaagagtatatctgcttggctgtacaaaatatatggattaaattccagggtaaatccagggctggaatattagctgagatcttaagagtttttcctattcttgcagaggccataggttcagtcctcaacacccaccacaggtggtttgcaattgcccataaccgagttttctgggatctgggcctcccagagcacctgcccctatggggctcatgtaaactcatgaagatacacacatacacacacacacacacacacacacacacacacacacataaataaatgcttttaaagatgctgatcttcaacaagattgatactgatctgtagcagcaagaaagaaatacttggataaaatggtgtgataatagcgaaacttcagtatttggaaaaaaatatatgaatttatctttcaaaaatgggaactgttgtacttttaggggtatagttgtttttttgacttttgatttttttaaaaaaagttttagctaccttgtgtgtcggttctttgtgggttcttcttctatctatctcctaacaatatcttctctggcccagctcagcttctcttggctcagctgccaccactgttttctcagtctactaacccttcactttctactgtcttttattttcattctgctccatnnnnnnnnnnnnnnnnnnnnnntcctctcctctcctctcctctcctctcctctcctctcctctcctctcctctcctctcctctcctctcctctcctctcctctcttctctcttctctcttctctgtcccttctcctctctctccatactccccactcccctttccccctctctcccctctcctcacagacaaaacctcttcctccatataattgtctgtgtcctaacttagatcacttagcttaaacactgcagagttaaagataaaaaaaaaatgttctggaatagtttattgtggttggagagattagatgtgacaagatacaaagataggcctggtcttttccaggctcaaacttgctatgccagcttaatcatctgagttctaagaattcctaattcctagaacccatgtacaggtggaagggcaggactggctaccaaagattgtgtgtgctcttcacatgtttctgtcttcctatgtgcatgtgtgcacacacacaaacatttaataagacactagccctacttaaaggaagatggcacatagtaaacaacagaggacttacatgtaaaataacttctatatcagtgtgaagttagaaaaggcttttttaatcaataaaaatttcaatggctctgtcttcctgtcaatctaaaaagcaatttaaaaaattaaaaaaacacccacaggagttcaacatacctgtatgctagtatcaaagttattatatatttgggatttattaagctttaagctcattttttctatatatttataatgtacataatatagttttatggttatatattagtcagtaaattatttttttataatattgcatttgagaagggtcatgaatagcttttaccctttaatgcatagaaatggcacattgcttttgaagaatgagcaaattcaaatccccatggatttaatggacaatgatgaaattacgtgttattttgagtgatatgttctggaaataaaagtgtcccttaaattccattaggtaaataggataaaatgaaagcattcactcatatataatttttaacatttccctaacatttagaaatgcattctaatatttttgcagaatatgtgcatatctgctagggtctgtaaaagtgcattaggaaagagggcagatgatgtgcatgtgccattagagccaaggctctgggccaggctgccagaggccttattaatttaaagccatgcttctcttttgtcagtgccttgctaaggatctgtacctcactgaaaagagcacagaagccactagcagaatggcagtcattattctcctggacacttaattctgatacttcaccctgaggctgaaatttcagtctgtgaagagctctacagcattgcatgggtgttctctagcactgagatgaggatgcttctaaaacaaaacatgtactttcctgagcaaaattttcagaaaagatcctcccccccccaccctcttcacatgcaaaatagaaccctggacccttcatggtgcaatggagtatctgtctatggaaagaaaggagacacttccggtggggtaatctcttcttctccaagcctctttcctgtggatgtctcatgtcatttaactgaggtactgactgctctttagttacgttcatatctctcctgttcagaaagaggcttttagagatagacatggtgctacacttttccaacttactttgataaatgttcaacctctgagaaaagttattaggatttgagggaagttggcctgtttagcagtagttcttagggggctagcccagtcttctttatcagttcagtctcgtagcaaacaccagatactaaccggtagctgtagtccagccttctcagcaggcagacaccacacgtgaaccagcagttgtaattcaatcctgaagaaaccacatggtttcccatctggcccgaggctgccacagaaatgtcaagaaggaacctcaggagcagttctttggggagtttctctcaatggcattgttaccaaaagcagagctatgtaaagctatgtaaagctatgtaaagcaggccaatacacgcatgttgttagcaaagagtagcaaggaggagcaaaacaaaccaatgttccagctcccactgtctgtgggctcatagagatctctaaatctaatttcttttctgtttctctcttgagcgtgatttctaacaaatcacagccatccccacggaatgaccaacaaccactcaatccacctatcaggactctggcatttatatagcctaagaaaaattcccagaattacagatgttacatggcaggtggaaaaaacccatgactgttctagaacacaggtcaaatcatagtgagctgcttcaaatcagctccattccccacacctgagattaaaatgagagcatattcttaaaatatttctgagctgggcgtggtggcacatgcctttaattccagcacttgggaggcagaggcaggcagatttctgagttcgaggccagcctggtctacagagtgagtgccaggacagtcagagctacacagagaaaccctgtctcgaaaaaccaaaataaataaataaataaataaataaataaaattaaaaaataaataaaataaaataaaataaaatttttaaaaaattttgtgttttgtacagaaaccaaaattccaaaattctcactgccttttcccttttctgttttaagtcactaattgtgctggacatagtgagaaattataaacagagactttttgggtcagagcccaaggttttcaggagacctctcctgctcagttataatctttataagtttgatggtatatacagctttttatttcctgtggaaatataagcaaatctttgtcttcaatacaaaaccttccatgccttccattctgatgttaagacatcctgagagtatacaagttgacttaattacatagtgttttcctataatccagtgtctctcagctgctgttgttcttttttttcattaatattcagatttaaacagagcattatttaatctatccctaggggtgtgcgtctttattcttccttttgttttataagcattttcttttttttaaaaaaactaatcaattaatttatttatatccaaaacactgtccttctctcagttccccttcacagtgttcctccctttatcatcttgcccttcatctcagagagggcagcgtccatctcagcatgctacatccgatagagggctaatatccaatatatacaaagaactcaagatgttagactccagagaaacaaacaagcctattaaaaatggggtacagagctaaacaaagaattcttaactgaagaatactgaatggctgagaagcacctaaagaaatgttcaacatccttagtcatcagagaaatgcaaatcaaaacaaccctgagattccacctcacaccagtctaaatggctaaactcagatgacagcagatgctggtgaggatgtagagaaagaggaacactcctctattgttcttgggattacaagatggttccacaactctggaaatcagtttggtggttcctcagaaaactggacatagttctaccagaagatccagcaatgtcactcctggacatatacccagagaggctccaacatgtaataaggaaacatgctccactatgttcattgcagctgtatttataatagccagaagctggatagaatccagatgtcactcaacagatgaatggataaagaaaatgtggtacattaacacaatagtgtactactcagctattaaaaacaatgaatttatgaaattcttaggcaaatggatggacctggaggatatcctgagtgaggtaacccaattgcaaaagaacacacatggtatacatactttagttgtccaaattctgcaaaatgaaacatacccatatgccatatttcatttcttttgtatccctagggttagttctagtaggaaatagagtttgattatacaaagaatgagcctactcattcttttcttataatttctttggcttgttatcaggtgatagaaagaattttctttaaacatttcctgttaacatggtatttttcatgaaaattttaggcttctaacacatttcctattaataattgatcaatttcttaattcccttgggctaatatacctgacaagactttgagaccaaatatgagtgatatataatgcatagtttctatttctgaatccctcttgcagctgtataaataacaaagttaattttgaattatctggaataaattcagcagttgctatatgcagaacaactatttcttcatattgagagtcagtaattatattaaaggattcaggaaaatctaataataccataaggactgcatacagctctgatttttaaacttaagtatatgggctttgaattaattacttttatttttcatatgaataaaatatataatataaatggtatagtgtcccattcccaaattctttgcatcagtatagaatgtagatgctacagggattggcattccttttacaattaatgggagaatccaattagttctttttataaattcaatacatttgcttttgggataattgctcttaatttctcccaaatagttgtttacaagctcagtgtcaatcttcattgatcacccataatgacatgatctcagcattagtgtaaggtggtatgctttctgccacgtttgttcctgacaattggcatagtgttattctatcctttatgattaaatcagaaactttttctacatgagtctttttactttgtttgtgctaagaaattccattccataatactgtcttccctttgcataatgagccccatagcagaattaattgaaggcaaaatcaccgaaacacaaatcaagtttgagatctgtgcagtccacatatgcacccttcagtctctgttcttccagaataaactctctcttcgctttagctgttcgccatcttggactgtttaagtctgcatctccttgtaacatttgaaacaaattacttacctttgagtagttaacctaatggtagactacagccagctaatatctcccatgaatttttgaaaatcgttaagtgtgttggggtccaggagtttccccacaaaccacacaaacaccaatctcagtcagacagagacggtttattaaatgcataccctaaaactgatcgaccagggctgtagcacagaatttaggggctaagggtatgacctcgagcatttctcaggactgacttataaaggaaaaactcacaaggagctctcatgcaggtgcagaaagtgctgcctggtgtttggctctgactcaagctatttggctagctagccagaacagttctaattgacctaagtggagcgtatagttgtagaatttcttaagattaacaaagctcagaatatacagaacataacaggatatgtggtcagcgtgaccctactctaagtcattttttttctatgtcaatgtctgacagacatattacaacaacagtatgaaatagctgtcagtcatggaacaaaatggctacaactatgctggggatggggacagacctgaacatttcccccttagagttgttccagtgagaaaaacaaaaacaaaaacgaaaaggaacagacatatacctgaaggttggccaaactattttcagtactctggatcccacatccaaaagacttagagaatgagagaacatatatgttgatgagtgtgattcttaatctgttaacattcttcatttccccgatttcggtttttgtaaataacaaaaatacagggggggggggttcaatgtgctggtagattcttctatatgtggaccctccagttgctgttgtactaatgatcaagcacctacagcttttcctcagttaacggccactgatctatccacacaggcttgtcagtcagccattttaaggatagggccattggtacttcagcagtggccaccccttatcaactttgaagttcagtagttgttaagttctctgtttggaccattggcacagtttggagttgatttttgatgatctgtatcaataccttcaccaagagtctaccatttccacccttatttacccaggggctgtctctgggacttcatgaatgataagctgagtacccaactgttgtaaaagatcccttcccccataaatgtatgcatatatcaaccacttaaggctttaactcccccttttgaccttctggtcccacacatttatttcatcacatactttgttttatctaagataacttttgtataaaactttagaagtggccattctgaattctaacgttttgtgaaatgatcagctcttgtatccatcaaatctatttcaataccatttacttgcaatgttaattttggactctactcattaataactgtttgtcagattgcacattttccagttatttctaaaccctcctgttctgttcttcctattagagcagctgtgtttttgatgtaggaaacagcggcaactgaacaacactatcacctgtactgcttagcccatagtttcaaattctcttttgaaatctccatctgttattcttggatgttcaatgagtccttgagaattcaaactgatccttcccaagattatccctactgtccctgagggcaaaggaccataaactccagtagttactttgtaacactgaattttaggggatagagtaagatgtttacctgtggacaagtctagagcctgcaatatcctgctttaaatcttcaataccaagtagacattttttccacctgcttgtcactctgtggctgaaacagctcatactttttgctgtagggcttcaaggtaagcccccaaagccatttcccagcggtaagaaatttccttgcatatttcttttgggcctacactcattgacccaaatggcaacccttgccatattacccaaacacccctggaaacctaggctttcctttttgtttatagttagaaaacatcttgcccttagggataccttttttcacagttttgttgcaaatggccgtatttcccacaattaaagcaccagacattttgttgttggagacttctagctatagcttgactgattatattagcatggtgcacgttagaatcaatatcaatcgtatcccttattcacttgtccccttttttcttcatttcagccaatttttttgtttcttaggccctttcattcctacccacagttatttcaacttctcagccattcttccaaccttttttgaaatagaatatacagacaagaaaaagaagaaaaaaaaaaacaaaaacaaaaaccaaaaaccagaaaatttcctctgagagcaaagccagggatattccagtgacagcagccacaataatttttttgctagggtcttatacctattccttggacccctgccattttctctatggcatttgaaatcaaatttttattttatcaagcccacagttggataccacttatagcaggtcttgatacctggtgggttattctttttcccactctttatccccctgctttcaccccctatctctgaatttaatttttttcttcttatcatttgttagtatcagcacatctcaagctttttgaaaacacagagagagagaatttcctaattggtttgacaggtcagcactttcaccctctacaccacacatagacactacaaagcaaatagcagacagatcaacatttcttatgaataattggtatgaaaaatctggagtgatgactcagaggttaaggtcacttattattcctgaagaggactcatgttcagtgcccagcacctacatggatactaataactctccttacagaggatcctatccatgccttcttctggcctcagctggcactgcacacatgtgatgcagacatagatgcaggcaaaacatccatacacaaaaataaaagtaatgaaaattttttaaaaaaatcacattcttaaaaataaatctcaaccagactcagaactgcatttagcagcatcccttggggttggctggacatggtggcacatggcagtctggaaggaggcagagagagatagacctctgtgagttccaggctaccctggtccatataataagaacttgtctcaaaaaaaaaaaaaaaaaaaaaaaaggagaagaaaaagaaaaagaaaatgaagtcagcaagatggctcagtgaataaaggcacactcagcagggaccaaactccagtcctctgccagagtagcaagcgttcttaccctctgccccatttcttatgccgtttaatcgtagtcctacaccattcctgtcttccggtctgttatgtgatttcccttactcagcacaaagcgtctacctttcacccttcctgttgatgcttactgtcatccccagccaaaagcttggtgctatgcccactactgttccatgtggcttctgagttatttttgtacgatagtattaagaggaacctacctttacacctcccaacttgtattgcttccttctcttcaccgaattgaaagtctaggcaatcagtttccaaattgtggggttcacaccatcagtggaaatactacctaggaacctgcacaaaacccgagttcttgtgtcctatcccaaacctctcgagtcagcaacccagaagatcaagtgcagtgagctatgccttcccagttccctagagtagcccggtaaagcctcagaaccattgaatctgtatccctgccacatagttgattttttaaaaatctttctcaggaagaaatttcttaggaggaagagattatggggaaacgacctcacctttgaacttgaacagctatgcttcaatgcatgatatctctgaagctatgcctgcctgctgcgttctccaaattccagggcaagagcattctattttcatgagctgcagctgatagcaaccaggaatccacggcagagctcctgctcctggcaccgaggacagttttccagcctgctctggcatggcctgtaatgacttctaggaggggaaaagagagggttggttggtttgttggtttgtttgtttgttggtttgtttgttgtgtgttgtgtttccctcttcaaacgtcagagggaagccagttgtggtggttcacatttgtaatccaagagctcaagagactgaggaggttagaggatatcctgggattacatagggcgttctaggacccctggggcttcagacccacaggaacagcaacagaaaaccaacagcagcaataaatgttcactcaaaatcaaaaggccagcaatggaagtgagtacctagcaccctctagacattccgtctctttgatgtgtatccctatcctccaagacacctggtggctggggttgacttctacacacccctcccccactctggcatcccagctgcattctctcctgtggaaccaggtgatggttcaccgccatttcacccagcacacccccctccatgcattctcttctttcccccacttttactattatacactgatgcgttctcctggaacaagcctgtgaatgccactctctaggagcctggcaccgtagctgctggtcagacccccttatcctcttagagcccctggttctccatgatctggccccagctggacctctgtaaagttctggttacccctctcaccccaaggattatcctgctgtcccctgacccctgtgctccctgctcctggttcactggctctgaaataccctcagattccatgcctgcttatttaaagcctgtccttcctcaaggtctgtctcaagtttcgccttcagaaatatccttgtcagtgtgctctccagaccccaggtctctgcagcatcttcatgcctgcctttcccttaattccctccgcctggttgttactgtttccatttcactccattcagtcttggcagtgtttgctgggacatcatctttctcaaagcccctgcagttacatccggacaagtatttacaattggaaaaaatctacaagtgctaagtatttaaggaattttcaacatgtttgtattttaatgaattttctttctagatgtgaactcttgttcctgtaagtgtaaaaactgaatctgttataaataatacacctcattattttcactgttttgacattggaagtgttgggcaaatatccttagcatgagcatagctcagctggcttctgaagaactccgaaaaaaaaagaaagaaagaaagaaagaaggaaagaaagaaaggaaggaagaaataaagaaagagagaaactaatgaagtttctttcctaaagtgccacagatggtcagattctagacttagccatggaagaaaactcctcattttagtaaatgcctaaagcttttatttagccattgccaaaaatttgccttcagtgggtatttgagaaaagttctactagaaatttcaaatatttaaatatgagtaatttattttcatatcctttcctttagctaagaaaacgatgtaaaaattttgatctgcttttatttatacatatgtgcatgcatgtatctgtgtgtctgcttatgttctagcctctcagggcacatacacactcttatgcacatgtgcaggcacacacagacatacatagacagtgatatacctatatatacaaagaaagatgaaataactctttgaaaatgtagattctcatttactgtgttggtatcctgactaaacattttatacatcaaaagcaatggagccatgccaaccactcagtggagtatgtggtattaggaaatacagttaggtattcatgcatcttttatagacaatcataatcgtcttatgtttttctttcaggtggtttgctctcttagagattcaactatgcattatcttagtgctgtataagtatgaatgcagtcttctggacccattaccaaagcaggtaagtgctctcagaactttaaacattatcatgacgtcagatatgacattaaaaccctaaacatctggcttttaatactagccatgtgttgagtgatgaccttaaattttaaccttgactttacacagagaggtcttctgtaggtctggaaatgaactctttgttttggatgttgtcattggttcatttgaaatgatgcaggaaaccaatcccctcgtacagacagtaaacagaaaggagaagaatacaactcaggtttaactccaggtagatgcagtggttcctgaagggacatgagtttcggaaccctggatcacggagggtttgtagaacatggattggtcagtctcctccctagggctcccaatctaacagttctggaaagaaccccatgtttgcatttctaacaagctacaggggcacctcttactgctggcagcctgggtaccacactgcagcgactgcttccataaggagtgaggaagagtccagttgaatcccaagtgtgtggagacctgtttggagacactctgaacggtgctatctaaacaggctgaggctctggactcgccagactatctatgaaggccttttgtgttcagtgcatgaaagatgaaatgaaaccccttgtgataactcaatgggaattatataagtgtgtaagcggctcagaaaatatgtttacagatatgcagacttcagcactttctattaatggtttcttttctgtttctcttgttgaatttttttattttatcaattcttttttgtattgtgatcacattcatccccctcacctcgcagacccacacacaccccattctttattgacctggctttggtctttatttcttttttaaattgtacagagtccaattagtactgcctagacggttttgtgtgtgtggccgttcactgggcgtgttagacctacccagcagccatacccttaaagaaaactgtcttgggctggagagatgactcagaggttaagagcactctctgttcttccagagatccagagttcaattcccagcacccacatggtggctcataaccatctgcaatgagatctggtgccctcttctggcatgcaggcagaatgttgtatacataataaataaataaataaataaataaataaataaatctgagtgagagcaagcgagcaagctgtcttctggtagcaattatcaattatcaatagcacctcagctagaagcgggactttgcactccacatcccccacccccaccctgtctccatgctagggtttagccactgtcagctcatatattcctgttatgtctaggaagcatagtttcctggtcacctaccaccttctggatcttatactctttccaccgtcttcagagatccatgaggcttgcaagggatgtgatatagctgccccattgcacttctgtcttgagaacaagcattaatgatgaagaactctcagaagctcgagagggagtactaaatacccttcaggaaagcccttagctgccttctgtgcatttgccagaacaaaggtcagagccaggctttctgaaaactgggtcctggtgctagagagatggctctatgatcaagagcatgtgctagtagatgactggaattggttccaagcacctacatttgatggtgcatacttatgattccagctcagagtatctttgccctcttctggtctgtagaaattgagcctggttcttcctctcagccccatgctatcagaaataagactcagacttaaaagatatttacaaataccttgaccatattgctaagctttttttctggctagctcataacatagaatagcccaactattctattctatattatgccatgtggctggtgacctgtgctcaggtcccatacattcatttagtcacatcttcccccaggcaaatctcctgtgcctggcattatcccataatcctgtctgcctcccagttgttctacctcctactggctcatgggtttcaaatctgaggaccgtgcactggatgtcattgtcagaaacatagacaccccaattcaaggtttacagaaagggttcagatgattttgaccctgtgattaaatataaatggggtgtgaggtccaaacaccagagccatgataaaaggggtggtatagaagactggaaggctgaagagaatgtaagcaatcatatacagataagacttactgtaactactggcacacaggttggcatgcataggccatacacagttgagcacaggcatacaagcctattaccacatagactgcaggtaggaaggtatgttagttgcttttctgttgccttggtgatttaccatgtccaaggtaactcctacaagggagtgtttctttggacttacatttcaagagggataaaagctcttgaaggcttgagggcgtggcagcaagcagcagggatgtcaggagagaaaagaatctgggagttacatcttgagccacaaacaagaagcagaaagaccaaactggaagtagggcaggtttttctatcttagagcccgccccccagtgacatacttcctccagcgaggttgctccagactcaccactcactcctaattggggaatcaagcgttccaatactgagactggggggacgtttcttttttgagccaccatagaagaggaagacgaaggtactcacctccaaccccaaggtcatgtttctgtagagccgtacaaaaatggcattgtatcaggaatagtcatatatcattatatgcctgttttccttttgggttcccaggcatctgctgtcagccatcattagctgactccatcccctgggtatgtggtgtcagccattttttggataactcatgcccgatatctgtatcagtgtcatgtggtctgaacataaagtggtacagtcagccttctacttcctacacaaggtgtcctaggttttgagccatggatgtattaatagcctttgttgatttacggcatcctcttcagtctgatgaaatgaggggtatggagcaggcaaacctgtaagccatggtgagtgtatttggagctgagagattattagaataaagacatctttctcctctctgctcctcaaatggtaaagtggatgcctgatgttttgaaattcagccatacaaacatttcccaaccttctggcctaccctccgtaccttttagacgaaatcacaggcaggcaaaacttaggtctaaaagtgttggcttccatctcttagtttctgtatctcttctgtatctctgcttttagagttctcgtcatttggtgggtgtcccccagcctgcagggaaatgccggattgaatataaacaaagagcttgactttcattgggactcaagagattcagaaccttctagaggagtgaagctacgtgcccagctactatcctcccagcacctcgacctaaagacatcctactggctcatggatttcaaatctgaggaccgtgcaccagatttcactgtcagaaacatagacaccccaattcaaggtttacagaaagggttcagatgattttgaaaaagttgataaaacgttggaatttggcttcatacatagccatatcaaaacttcaagtagaaatgtcactttcatagaaatatttgtatgttaaattcactgtgaaggcaacatacataaaaaattctctttttgcaaaagaactacagtggaggacactgaaaaattagatcaattctagatattttatattttcaaaatatggtacttaactagaccttggaaatcttaggcttattgatgccaaccgctgcagacatgcgtagtgctcagaaatgtagataaatagtgttttacgatattggtggggctgagttcccatgccgcggtcattcctgtactctgttatgcccagggtagcgtcttcctgttggggatagctaatcagtgcacactgaccgaggcattggcttgtatgttagctaagggggaagcactcttttgaatcaaatgatctttgctcgtagtttgacaaagataacatttttactcatatgtaagaacgcgcagtctcattatgtctggttataccatgtctttgtggtatccctgggagacctgctcttttcggaaatgaaacatgaacagtggatctggggaagaaggaaggtggggaacggaaactggggtgggaatgtattgtcttaagagatgaataaataaatcaatggataaaataaatgcgcatctggttttgtgccaggtaaataactgcacatgagtctggtttttgagtcttaggacagaggaacatttgccattacgttctggagagaaaacacagcagatccatgggaacatagggttttcctgaaaaacggcaccatcattcatccgccagaatccagtaagagttcatctctgacatttcatggtggctgtatatctcttctcaggcttcttcccttacctgtcctggctccggctcctgaagttggaaattgttgactctccttttcctcactgacaaggacacaggtctccagaagactgaccagtgctttcgagagtgtccactcttcgcaatgagtgaattgattctggagctcaactggcagctcagagcttccctcagcaggctcggtgcactggagaaggcagctcccaagtccacagcagggtagtgttgcagcccagcctggcaggttctgcagtaacagctgtttcctgtgggaagggatatgcactacccaacagccaaggcccacagtgaaatgctatatttgcttatatttgcataaagttgaactaa

SEQ ID NO: 56 - DNA, 3190 bp, Mus musculus
gtttactcgagctccgccgcctcaggatgtgttcccgcctcctccgtcccagcccagcccagcccagttcaaatcaaagctttttttttttttttttttttttttttctcataatttgaaagccgtgggaaggtggaagatagccacaatgcaaaaatcacacaaaaactggggcggggcaaaggaaccacagttacgcaagagaatttgtttaaaaagtttctcggctcagagtttgcaaaactgggcgcattttcctcagtcggcgggggactaggagattcccctggagaaggacgttttcaaacgtctgttgattctggaagatgggcattatggagttattctcaccaatagcaatcgccgttctgggaagctgtgttcttttcttattctctcggttgaagaatttgcttggacccccgtgcatccaaggctggattccctggattggagctggacttgagtttgggaaagcccctcttgaatttatagaaaaagcaagaatcaagtatggaccggtatttaccatctttgctatgggaaaccgaatgacctttgttagtgaagaagaaggaatcaatgtgcttctaaaatctgaacatgtagattttgaatcagcagtacaaagtcctgtctatcacacagcatggattccaaagaatgtcttctctgcactgcatgagcgactgtatgccttgatgaaagggaagatgggaactttcaacacacatcactttactgggccgctaactgaagaacttcatgagcaactggaaggtttaggcactcatggaacaatggacctgaatgactttgtaaggtatctactttatccagccacactcaatactctctttaagaaagggttgtttctcacagacaagaggacaatcaaggaattctaccagcagtttaaaacctatgatgagggctttgagtatggctcccagctgcctgaatggcttctgagaaactggtcaaaatccaaaagatggctcctggcgctgtttgagaaaaatattggcaacataaaagctcacggatctgcaggtcattctggaaccctcttgcaggccatattggaagtggtggagacggaaacacgtcaatacagtccaaattatggactggtcgtactttgggctgctctggccaatgctcctcctattgcattctggacacttggatatatcctgtctcatcccgatatccacaggactgttttagaaagcatatcttctgtgtttggcactgcaggtaaagacaagattaaagtgtctgaagatgacctgaagaagcttctaataattaagtggtgcattctggaatctgtccgcttgagagcccctggtgtcattactagaaaggtagtgaagccagttaaaattctgaatcacacagttccttctggtgatctgctgatgttgtctccattctggctacacagaaatccaaaatattttcctgaacctgagtcattcaaacctgaacgctggaaagaggcaaatttagataagtacattttcttggactacttcatggcatttggaggtgggaagttccagtgtcctggaaggtggtttgctctcttagagattcaactatgcattatcttagtgctgtataagtatgaatgcagtcttctggacccattaccaaagcagagttctcgtcatttggtgggtgtcccccagcctgcagggaaatgccggattgaatataaacaaagagcttgactttcattgggactcaagagattcagaaccttctagaggagtgaagctacgtgcccagctactatcctcccagcacctcgacctaaagacatcctactggctcatggatttcaaatctgaggaccgtgcaccagatttcactgtcagaaacatagacaccccaattcaaggtttacagaaagggttcagatgattttgaaaaagttgataaaacgttggaatttggcttcatacatagccatatcaaaacttcaagtagaaatgtcactttcatagaaatatttgtatgttaaattcactgtgaaggcaacatacataaaaaattctctttttgcaaaagaactacagtggaggacactgaaaaattagatcaattctagatattttatattttcaaaatatggtacttaactagaccttggaaatcttaggcttattgatgccaaccgctgcagacatgcgtagtgctcagaaatgtagataaatagtgttttacgatattggtggggctgagttcccatgccgcggtcattcctgtactctgttatgcccagggtagcgtcttcctgttggggatagctaatcagtgcacactgaccgaggcattggcttgtatgttagctaagggggaagcactcttttgaatcaaatgatctttgctcgtagtttgacaaagataacatttttactcatatgtaagaacgcgcagtctcattatgtctggttataccatgtctttgtggtatccctgggagacctgctcttttcggaaatgaaacatgaacagtggatctggggaagaaggaaggtggggaacggaaactggggtgggaatgtattgtcttaagagatgaataaataaatcaatggataaaataaatgcgcatctggttttgtgccaggtaaataactgcacatgagtctggtttttgagtcttaggacagaggaacatttgccattacgttctggagagaaaacacagcagatccatgggaacatagggttttcctgaaaaacggcaccatcattcatccgccagaatccagtaagagttcatctctgacatttcatggtggctgtatatctcttctcaggcttcttcccttacctgtcctggctccggctcctgaagttggaaattgttgactctccttttcctcactgacaaggacacaggtctccagaagactgaccagtgctttcgagagtgtccactcttcgcaatgagtgaattgattctggagctcaactggcagctcagagcttccctcagcaggctcggtgcactggagaaggcagctcccaagtccacagcagggtagtgttgcagcccagcctggcaggttctgcagtaacagctgtttcctgtgggaagggatatgcactacccaacagccaaggcccacagtgaaatgctatatttgcttatatttgcataaagttgaactaa

SEQ ID NO: 57 - protein, 464 aa, Mus musculus
MGIMELFSPIAIAVLGSCVLFLFSRLKNLLGPPCIQGWIPWIGAGLEFGKAPLEFIEKARIKYGPVFTIFAMGNRMTFVSEEEGINVLLKSEHVDFESAVQSPVYHTAWIPKNVFSALHERLYALMKGKMGTFNTHHFTGPLTEELHEQLEGLGTHGTMDLNDFVRYLLYPATLNTLFKKGLFLTDKRTIKEFYQQFKTYDEGFEYGSQLPEWLLRNWSKSKRWLLALFEKNIGNIKAHGSAGHSGTLLQAIVVETETRQYSPNYGLVVLWAANAPPIAFWTLGYILSHPDIHRTVLESISSVFGTAGKDKIKVSEDDLKKLLIIKWCISVRLRAPGVITRKVVKPVKILNHTVPSGDLLMLSPFWLHRNPKYFPEPESFKPERWKEANLDKYIFLDYFMAFGGGKFQCPGRWFALLEIQLCIILVLYKYECSLLDPLPKQSSRHLVGVPQPAGKCRIEYKQRA

SEQ ID NO: 58 - DNA, 103026 bp, Homo sapiens
gaggtgggagggagcgacaatggaaaaatcacctgaaaactgggacagaggaaggaagctacagttacgaaggagagctgcaaaagttgcagcagaaaggttgggagtcccgacaggttccgtagcccacagaaaagaagcaagggacggcaggactgtttcacacttttctgcttctggaaggtgctggacaaaaacatggaactaatttccccaacagtgattataatcctgggttgccttgctctgttcttactccttcagcggaagaatttgcgtagacccccgtgcatcaagggctggattccttggattggagttggatttgagtttgggaaagcccctctagaatttatagagaaagcaagaatcaaggtatgtggtcgtggcagacggggtctccagaggagacaatgctttcttttttaaactttctttcattgactcttaagtgcagggctagaacacggggaacatacctgcttgcctcaactaaaggatctagtcatttctgaattcctctactaacaattaacaacaatatcctgtgcaaaattttgcgaaagaaatgaaatacaattgcagcgtgcatcgacatttttggaagtagagattaacttttcgtatttttacttcatcgaagttaagttccaaatgtgtatgtgttaagtaaatgttttcagtaattgggaaagataaagtgtaatccaatttaagtttgtgaaaatgagtaattcgtatccaaattggagttaacaccaaagtattgtacaaattgcttgcacagttggtccgtacacaataaacaggctctgtatttttagctgacgttgttatttgatgatgatgtactccattttcactacggcctgaagagactagtaatcctccttgtagtagatgtttttgtcttgaaagtatcttttaaatgtctgagcactttaaggaacagacctttattaatgtcttttaagttttattcaatttccagtcacaaatattttatggtatttgattgtctaataaatttgtatgatattataattattcttatgaattataatactttctgtggtgacccattttccatctggttagcccaatttgtagaatgaatttatacgtagtagcattattttaccactgatcatttgccttcaaaatctctgagattccaatttagtaaaaaacatatagaaaattaaagagaactaagatgaaaataaaaataacccagaatatcacaccagctgtactgtaaaaatttagtgtatttatattattttggtcattttcctatgtatttacaactatttaatgaacaacaatggaataatagtataatactcttttatgtgcttttgattttaacatataatgtgaatgactttcctgtaccatgaaatactttgaatcttccttttatggctatattttgtcataggaggatacaatagtttacttaaatctcaatagttgggtttataggttgctgccaaacttttttctttcagccagtgcttcagtgaacattcttgcgtgtttgtgtgcatgtattgattgtgtggttgtacattttgcaattatctgattgtttactcagaataaattcctaggagtagaattgctgagtcaaaggacatgcacacttaaattgtttatatgaatgtgttacttttggaaaaagaagtatgaatatgcaatttttattttccattgactgtatgcaattgcctaacttctcaaatcctgggccatactgaataccataattctttgcaatttttgctagtctgatagatgaaacattatatctcctaaagaaatactcctttgtctcccacagccttccttatgcatatgatcttgataatttttaaggaactgtttttttacaagcttgtgtcagaaggctaaatatttgtgaggtctctattgctttcctgactaaacaaaacaagttattgctggactctgtgtctcacacctgtaatcccaacactttgggaggcaggggtgggaggattgcttgaggccaggaatttaagaccagcccgggagatatagcaagacctcatttctacaaaaactaaatagaaaaataaaaaatttaatctggtccagtggcacatgcctgtagtcccagctcctcgagaggctgaggcgggaggattgcttgagctcaggagttccagattccggtaagctatgattgagccactgcactcgagcctgggcaacagagcgagaccttgtctcttaaaaaaaaaaaaaaaaaaaaaaaaaaaaaaaaaaagaatatgactgcattatttgatgttttactactaaaagcttttaaggttcactcttgtcttttcttgtacccttaatctgggcagtatgataaaaaaaaaagccagagtgctcccacctttggtgccaggggagattcaaatcacacaaacctcaaccttcatgcaggaaggctcacaccagcctaccccctaaccacaatgaaaccctaagacctgtctcttttcactgttttctcaagtcattttcagatcagcttgagaggactgcccttctttccccagagaagtctcattgtgtatgaaataaacctcttcataccctctcaaggtgtgtatgtgtgtatgtgtgtgtgtgtgtgtgtgtgtgtgtgtaaatgtagtaattgtcttaacatccaaaccagatcttgggtgggggtccattctgagttttcgcagtggctgcaacaggtactcagtagacttgatgcgaaattgcatctaaatggcacctgcataagacactacttatggcgtattgaaccttcaagaaaaaacttctaaaactccatcattagctaacactctcagcttctcatgctcctctagaagactgagaagagacaactttggtgaccacaaaaacatcttcccattatttttatttaatctttgaatagatcatgcatttatacggttcaaaaaattgtaaatataaaaactacggggaaagtcccttcaacctctttttcccttccacccagttctcactcctcactcccaaccttggcaactgtaattcatttcttatatattgtttcatagtttctttaactgtatacaagcaaatagaattatagatttttattttccgccttataagcaaaatgtgtcatattattcacactgttcctatgtcagtagggatttactctttacatattagtaccatatagaactcctaattctttgaagatgcatggatatggctacatttatttaataagtttcctcatcgatagacatatggtagtcagatttctaagataacctgcaatgatcttgcaacgattcccttgtgtaatcacttccttttgagtgtcaacaaaacctagtgactcacctctaatgaacacaatatggcacaagtgatctgatgttacttctgtgattaggctttcatcttgatagcagactcaattgccttcctagtttgcactctttgatgatgaaagctgtcattatagagaggcctacaaggcaaaaaatagagggaggccctggccaaccccagtaaaaatcaaaagtcttcaatccagtagcctgtgaaaaactaaattctgccaccaaccgtgtcagctgggtagtgaatacgactacctgagttgagccttgagatggctagaacccaatctttagttacgaaattctgttacaacagaaaaacccatattgcaaacctgatactttgtactttataattgagacagaagattttgtttatgcttcaaactgcctggttatatcagtcttttgtttattagaatttaccattttttaagcatgagacattgataacatttctggcactctgagagagttattttaaacatgtaatagtatagacaatctgcagctatctacaagtatctatttgttgacacaatggaaacattatttgtttttttttttaacttttaccaactgttttaatatacatcaaacaatctgcattaatccttttagtctttttgacctaccctctctgcatcttaatcattttcttgttgtgccaatactgtttgcataagagtaggtttataatttttttttattattatactttaagttctagggtacatgtgcacaacatgctggtttgttacatatgtatacatgtgccatgttggtgtgctgaacccagtaactcatcatttatattaggtatatctcctaatgctatccctcccccctcccccctccccccacccaacaacaggccccggtgtgtgatgttccccttcctgtgtccaagtgttctcattgttcaattcccgcctatgagtgagaacatgtggtgtttgattttttgtccttgtgatagtttgctgagaatgatggtttccagcttcatccacgtccttacaaaggacatgaactcatccttttttatggctgcatagtattccatggtgtatatgtaccacattttcttaatccagtctatcattgatggacatttgggttagttccaagtctttgctattgtgaacagtgccacagtaaacatacgtgtgcatgtgtctttatagcagcatgatttataatcctttgggtatatacccagtaatgggatggctgggtcaaatggtatttctagttctagatccttgaggaatcaccacactgtcttccacaatggttgaactagtttacagtcccaccaacagtgtaaaagtgttcctatttctccacatgctctccagcacctgttgtttcctgactttataatgatcgccattctaactggtgtgagatggtatctcattgtggttttgatttgcatttatttgatggccagtgatacagaatgggaaaaaatttttgcaatctattcatctgacaatgggctaatatccagaatctacaaagaactcaaacaaatttacaagaaaaaaacaaccccatcaaaaagtgggcaaagtatatgaacagatacttctcaaaagaagacatttattcaaccaacagacagatgaaaaaatgctcatcatcactggaaacattacttgaaaacacagtgtcccaaagtgtactaggctgaagttcgatattttgcaaaaatattcaataaatagtttaagtagattgttggaaaaatatttgctcaataaagcatcattatttttcaggttctaatgagggaaatggtgtctacctcccaccaacaggtgtagaatgtgaaattctgaaaatgtgggcataggatctaaatgtcaagcagcccccaaaaagacaaagttccctacattaaaataggtaaattagacaacttctgcagtttgtctacttaaacagctcttgggaagggcacctcctttaagccactctaagcgatatttgaagtcttacctgtagtcatctatgttgagttaaaatctactttctcttatattattaaagctgcaccaactttgttttggttagtgtttggatgatacatatttttctatccctttcaatttttctgagtctttgtattttaacccagtctcttgaaaaataaaagatagattgaaccaaatgaaaataaaaatacaacatgtcataatttctatcactatgtgcttatattagaaaagaaaaacctgaaatcgataaactttcaagaatcatctccttttataaacagagtaaaataagcccaaataaagcagaaggaaggaaatagtaaggaacagaaatcaatgaagttgaaaattaaaaaaaaaaataaggaaaatcaatgaaagaaagaactggttttttgagaagaccaataacattgccagacttcatgcaagactgatagagaaaacaccaatgaccgatgtttgaatgaaacagggaatatcactgcagacatcaaaagggatgataagaaaatactatgaataactctacaaacataaatttaacaagttatataaaatggatcaattcttagaaaaacgtattctaacaaaactatccaatatacaatacataattttaatagccctacactattaaggaaattgaatttgtattttgataacctcccaaaaagaattctctatgcccagattgtatcattggaaaactataccaaatgtttaaaaaagaattaactatgagttccatttcttccagaaagtagaagacaaaggaacatttcccagtctattttatgaagctggtattaccttgatctcaaaccacagatagtacggaaaaaaactacagacaagtattacttatgaatatattaatagatgcagaaataacaaaatatcagcaaataaaatttatcagtatatgaaaagaattaccgagtgaagtctgtcaatccacataggctgctgtattaacaagctaaagaagaaaaagcacataattgatacagaaaaagcatttgacaaaattcaatatccattcctgatatccattcatgatatcaggattcatgatagagggaaatttcctaactcaataaaggacatctacaaaaatcctgcagttaacaggacacttaaatgatgaaagactaaatacttcccccatgtgattgggaacaaagcaaagatctctgttgtcacaactcttattcagcatagtgctggaaattttagcctgtgcaataaagtaagaaaagaaaagaaaatatatatggattcgaaaataagaaataaaactgtcttaatttgcagattacatgattgtctatgtagaaaatcccaaggagtctacaaaaacctctggaataaatgcaaggtatacataaagatatcaattgtttggttacatactaacaatgaacatgtggaaaccataattaaaaatacattaccatttaaaataactcaagaaatatttaggtataaatgtaacaaaatgtttagaacttgtatgctaaaatccacaaaacattgatgaaaaaaatcaaaggtcttaagggagaaacatactgtgttcctgattggaaaagtcaacatattaaagatgtcagtttcctccaaactgatatccaggtttgatgcaaatgctattcccagcaagatttgttgtagatatagacaaggttattctaaaatttatatggaaagacaaagaaactaaaatacataaaacaattttgaaaaagtagaatagaatgagaggaatcattccactcaatttcaaggcctattattaatcaagatgatttagtactggcagaaggatagacacaaagattagtggaacaaaatagagtatctagagatagagccacacaaacatgccaagtgatttttggcaaaggtgcaaaaacaactcaatgaaataaagatggcctttttaaacaaatggtgatggagcaatttgatagcgtaagccaaaacaaacaaaacaacaacaaagaaccacccccaacacacacgaaacatgaatttctacctaagtcctatatctgatataaaattaactcaaaatagataacagacttaaatgtaaaacataaagatataaaacctgtagaaagaaatatagaagaatatcttcctaatttgggatagaaaatagctcttagacttgacaccaaaaggacagttcataaaaggaaaaactgataaattgaacctcatcaaaattaaaagcatttgctctgtaaaagagctcattaaaaagatttaaagaaaagctacacactgggataaaatatttgcaaaccacatatccaacaaaggactagtatctagaatatataaagaactgtcaacactcaacaatataatacaaaatccagttagaaaatgggcagaggacatacacaagatgtatcaatgaagagaatattcagatgtcaaattggtacacgaaaagatgttcaacatcaatagtcattagagatatgcaaattaaaatcatgagatactactacacatctatcagaacggcaaagataaaaattgcaacaacaccaaatattggtgaggatacagagaaactggattacttatacatatggtggaaatataaaatggtacagccactccagaaaacactttctcagtttcttaaacatccaaacacgcagccaaccatatgacctggcaattgcacttctaggaatttatcacagagaaacttaatgtttacataaaaacccagatatggatgtttatggaagcactatttgcgatagccctaaactgaaaagaatctcactgtctttcaaccttattcatttttattgttttgatttttagagacagtcttgctgtgttgccctgcccagagtgcagtggtgcaaatcatagctcactgcaacctcaaaaactcctgggctcaagtgatactcctgcctcagacccccaaagcagtaggattataggcatgtctagcccagccttcataatgtttaaataaactgtcgtacattcatacagtggaatactactcagaaatataaaggaatgaatgattgatacacacaatttggatgaacattcagagaattacactgaatgaaaagccagtccccaaaaattgtatactaaatgcttctgtttatatgacatagtgaaattcaaagttatagaagtggagaacagattagtggttgccaaggattaatgagaaggtaggagtgagagaaacagtgggggctggctataaaagggcatcatttaagatctttgtggtgatggaaacattctgtatcttgactgtatcaatgtcaataacttggttgtgatactgtactatagttttgcaagatgttaatactgggaaaacagtaatggatacgtaggctctttctgtaacatttcttacaaccgcatgataatctacaattatctctaaataaaaagtttagttaaaaaatatacaagcaccacttctacaacataccgtgtgtgcctgcctgtacttcgtaacaccgaggctgctgacattgcatacaaaaaaagaacaaaaggaaagcaagtaaaacaaacacaacaacaaaaccctgttgcataatttctaacactgtgcatgaccatcttttactccgcagttatattgcagttactttaaatgcctcacatcaacaattatctcaactgctgattcaatgtatttgaatgtggttagtctacacttgtggccaggtgcttatagatgttacaaaaagctacctactaatgggaagttaagaattctcatttgaacaaaactttaacaatgaaaatgagtcatcttctaactactggttaacaaacaattacagataggaatgttagaaagcagtgtagatgtctggatcactaatgcacaaaaatgggacttcattttctggtggcttaatgatttttgggcctgcaagttgcctagtagcacccaacactgtgttgcaggagtaatcatgtgtcatctcttgggaggtatagaaatgactaatactgaagtagtgatgagcataaattatgccttgagatatgtataatgctgtaatggaatatgaaagtatggtgatttcttttgatgatagagtcatggagaagactgaggtttgttgcccacattcataattgaagaaactgctaaattatacttagacgccaataaaaatgatgacttttttttcccaacaaggtcatagacccctgctatcaaaccctgtgctacagtatgttcaaaggttgctaagagtgatctgataaagaggggaaaattaatgatgtaggagagagagagtcataaatgtagaagagagaaggcaagagtgtaggatccataacacaaatggagaagtgttgacatttcacaagggcaggaacctccatccgtgttaagaggagggaacgcatggagaatgggtgcaaatgtatataccttgcaggatttagtagcgagaaactgagaccgctacttgattgctccatttttctagtgagttacaaggcagggacactatgtcagaatggagaggttgggcaggttgtacaggtgaaataatcattttgaaaactaggaaagtgaacagattagaaaagtgtataggattgcaagacattgttgaataaccatggatttcccataaaccagttggcaattttgaacctttttgttgaacaatattcagctataggttgcttataagtctaccaatatcttgaaaacaatgtttaaatgtcacaatgttgatataatttctaattatttataattattattttctacttatttcatagtacaagaaaagaagctataaataggcaataaaatgatcaaagggaatattacatattaggacagaacaaattaaaatgtatataattcagatctggctgaaacaatcaaaatttataactaattgccaaatataatcataataatttttcttttgactataacttcagcattaggattcttgaggagaatggtcttaaacatggcttaggaatgcttactaatataatctatgtttgttttatttcagtatggaccaatatttacagtctttgctatgggaaaccgaatgacctttgttactgaagaagaaggaattaatgtgtttctaaaatccaaaaaagtagattttgaactagcagtgcaaaatatcgtttatcgtacaggtaaagaatattttcagatagtccattcgaaatccaacattggaatccaggagtagttttaggtaaaaattacatcctcattcctctatcaagaatgatgagggtccattattttattcttgaggtatgggtagaagaggaaagagttatgggtagaatagtttggccattgaaatgcaaatgaatggcagcctaatacatttagatttgaattagacacgtgaaagtgataaggttacctcattgatgttttctttagagaatatttggaatctgtatcatgttacagcttccaagatgtcactaactctgttccactgctgtgtatacagtgttctacagggtacagctcttggactggttacatgttactcagtccctgaaactagaattccatggcttagtaaatcctttacagtggcatttcctgacaaattttatagggctgttatggtcaatgggagcttgacttgccctttcacaaatcctccatcttcagagactaccagattgtacagtcagcatgcttccagtatggctgtctgccttcatttcttcctaggctgcaattgtgtgtactggggccatgtgtcctccctggaacgcagagctggttcaatttgtgtctggttcttttttgtgctttcacaatgtttttgcttgcttctattctctgtggcttctttctctctgtttcccttttttcttctttggttccttttcatgtaaccttttgtgcatttcttgccattaagacaagaaagtttgttttaaaagctaccagtaatcaatagaattatatatattttttcttcttgtatgcatgatcatcacaacctgttggtgaaattatttgattatttagtgcttcttgatacttggactatggaattttagatcaaataatataaatattttgaaggcctttgatctgtagagtcgcgtatcccttcagaaaaatttactaagttacctatcagaggtgtatggaaatgattgagtttttttcacctgagcctcctctggggactttcatgtttaaatatttcattgaacagatgaaatatattaatatttattcttgagtcagcttcccatccctcccatatagtagatgtatgctactatacatagagaagatgtatagtagcatactatacataccagcatagtatatgtatagtagcatagtatacatactatactggtatggtaacatagagaagatgtatgctcaggaaatctaaaaactgtttttcattaacttacacaaaatgtatcttacacgtaataggatgacgaaatacaaaattaaaacttattctttgaaaaagttacttcaataaaatgacaacaatggacacaggggactactagagggaggggggtgggcggcagggggcaaaggttgaaaaactaactattgagtactgtgctcattacctgagtgatgggattaatcatgccccaaacctcagcataacacaatatacttgtataacaaacctgcacatgtaccctttgaatctaaaataaaattcaaaatttttttaaaacagaaaaagttacttcaaggtcaataaaacaagataaaataaaaatataaagaaatgagtaaacaataaaccacaatttctaattaggaatgtgtgttatagaaggagcacgaatactaacataaagaaaatagtgggctcaaagctattcatggggttaggaaaggcctcctggtggaagtagtgttcaagaagacacttgaaggacaaatagaaatttgcaggagaagtttgaggctcataggtataagtgtgtgggattgggtgggagtagatatgggtataataaaggagagaacattctgagcagacagaacagcctctgaaatgctgggatatgtaaaatatgtttttaatgtatctggactgtagattttgagggagaagggctgaaaataccagctctcttaatcacccatttatagattatcccttaaagtgaatagatttccattatctcacagaatacgttgaatcttttttatttgtttgttttgagataaagtctctctctgtcacccaggctggagtgcagtggtgtgatgttggctcactgcgactccaactcctgggttcaagcgattcttctgcctcagcctccccagtagctgggattacaggtgcccgccacagccagctaattttcctatttttagtagagacagggtttcaccatgttggtcaggctggtctggaacttctgacctcaagtgatccacctgccttgttctcccaaagttctgggattacagttgtgagccaccacactcagtcgagaataggttgaatctttatctacttttatttatgggaggtgaccttatgtactgagaggactttggctgtagtccctgctgaccaaataatagtagatatatattgactgtgtgtttcaaggagttgttgcttattttgaaaatagttttctttgttcatagcatcaattccaaagaatgtctttttagcactgcatgaaaaactctatattatgttgaaagggaaaatggggactgtcaatctccatcagtttactgggcaactgactgaagaattacatgaacaactggagaatttaggcactcatgggacaatggacctgaacaacttagtaaggtaaatagacgcattagtatgatttagtcttgctttttgttttaaataaaaaaattgaaacctatagattggacttcaaacattgtcaggttgattaatgaaatctacctaactaggctattaagagattattttaatcttttaaatttttttttttgagatagagtctcgctctgtcaccaatcttttaaattctaattcagtttagcatttctattttatggtgagcaaacaagccaatacagtcattgtaatacatttgcagtaatttatccttagtcattccatacatttgtgtataaactacacggattttcttcttataattttcatacttcctgtagaattttgataaaacattcagtgcaatttgctattattagaatgagaggacgttgagaggataggggagagaatggaatcataaagtggtgaaaaaagtccaggagatgtttgtgttacttaacaagtggctcaggcaaagtcagtgtgggcctcaggactgagccccagggtcctctattaagggagatcccaagagacagggaagagcagcagacggagtcagccccattctgaagctttctggaaaagttaaagtctgggcatgggagacatgagaaaatttcccacatgcataaagagatttcgtaagttgaagttacctgagtcactttgccatctcagcaggaatcctggaatgcccaaggcaagattgagcagttcagactcagaatgacagtgaacattttgttagaggtccagtagtagggggtggaggggggacacaaaaacaaccaaatttaaaaatgtgctgaagcatacccaatatctataacaaaatgaagatattgaaatgaacaaaatattcttggatatttttaaaactttgggtggaggagattatgaagggatggtaaataaaaattaaataaacagtattaagtgttttaaggcatgttaacaatattttatattctttatcttaagtatgctacagtaatcactttattctcttaatggtaaaacttattgatgatatgtactatatttcaatgggcaatagtttgaatttatgggatcctgtgagaaattagggaatttggtgactaatattgccctgaatctttgttgttgttgttgttgttattgttgttgttgctgtctaaaggcatggactatatcttagctactattatttgctaaataaattattgttgaattgtattagatcagtttatttattatctcatatttgtcagagtctaataagcttgtttagaaagcatttaaatatcttcagataaatcaaaccacagtttcagttccccctgtattatcttgaccacagtaagcaaatatcaaaacttcttaagagtgactttttcccaagagaatctgtcacctattatctgctccccatatattgctatgaaataatgccttgctttgtatcctttgcctttcttctttggtcttcgggtctgactttttgtgtgtttctgtctttgtagacatctcctttatccagtcacagtgaatatgctctttaataaaagtttgttttccacaaacaagaaaaaaatcaaggagttccatcagtattttcaagtttatgatgaagattttgagtatgggtcccagttgccagagtgtcttctaaggtaacagttgtttcctataattaattcattgaccaagcttatctcagcaattcaacacctctcatttttctgttctaagtagatgtaacagcagtttaagtgggagagaagccgtttcttatgacctgtttgtttttggtgtctgtatgtgaattgaaggaggaccaaggaagagagatgcttttcttattgtgatgaacaaaaacaaaagagagaaagagatcgatgggattaagaatttattttgaggtcttttatcccatgtacagctttttattattgcactcattgctacagttaagattcctgctaaatcgtcaacctgagcagtctcagaatcagacactgtgctcctcattctctctgaggcaaacatgggcgtggttaaatgcatttctcacagttggttcagacaaatgtttgtaaaatgaggcacatgcaaagtaactgcatgattttgaaatttcttggcagtggctctatgtctttctccatatgggttgctataacaaagtatcatagactgggaggcttataaacaacagaaatttatttctcatcgccctggaggctggaggcctgagatgagggtgccagcatggtcacgttctggtgagggctatttctcattgccctggaggctgggggtctgaaatgagcgggccagcatggtcatgttctggtgagggctccttccgggttgcagactcccaatttttcactgcattctcatgtggtaaaaggggcagacagactccctcagaccctgttcataaggttagtactccttttcatgagggctgtagcctcagaacatagctaccatccaaagacccccacctcctaatgacatcaccttgggggttaggatttcaacatataaagatttgggagagacacagacattcagaccatagcctacgtagaccattcatctacaatggtgactgttcagacaagatttagaagatgagagccagtttgtttttcccggcttaagtcagcgattggttctgtgcattgggttttcatcctcctgcaacttacagcagccacagtaaaggcagaccaagcaagtgtgggttctgccttcttattcagtgccaatccagtaggactccaaagttttatttacaaaagacactaaaatgtagttgctctgcctccccagctgtctttgtggactaatcattccgaaggtagaccttccatgaaattatacctgaaaatgaagaataaatttggagaactaattttaattccacagacatcccttttttatgctgtgacctgttattcctaaagtgctttccaattaatttctatatatattttttctcatgtagaaactggtcaaaatccaaaaagtggttcctggaactgtttgagaaaaacattccagatataaaagcatgtaaatctgcaaaagataattccatggtaagtatttcttacctttcttttgctaatgtaaagatagtaataaattattgttgttaaaatatattttgctaaaacacatgagattgattagataccatttttgtgtcaaccactgtactggacatgttgagatacattatttcactgttacatcatcacaacaacctatgtagaagaggtatcctattccacataagaaaaaaccagagacaacgagcaaaaaaatacaattccgatgttccgtattgatttctgtgttatcatacagttggctgtgtcaatagcgacaggtgaaactaatggcaaattaggaaaaacaaagctctacaaaataggctttgttgttgatgccactaccgttagttgtttcttcagatgcaaggaagcagaatagtataatttaaaaagccaggcactaggaacctgtgccctaagtgttattccagatctgtggttcttcaaatgtggcccataaaccgacagcaccagcatcacctgggactcagtcagaaactctgcagtaggccaggcatggtggctcacgcctgtaatcccagcactttggggggccgacgcaggagaattgcttaagcccaggagttcgagaccaacctgggcaacatagcaagacctggtctctacaaataattatatatataaaaaattagccaggcatggttgcacacacctgtggtaccggctactcaggaggctgaggtgggaggatcacacttgagcctggggaagtgaaagctgcagcaaaccctgattgtgcccctgcactccagcctggatgacagagcgaaatcctgtctcaaaaacaaacaaacaaacaaacaaacacctctgaggtagacaatctgctttaacaagccttacctttggttcagatgcttgctaatgaatggttctcacctctgcctctcattagaatcactctgggagcttttgaaaactgtctgaggccagggtctgcccacagagactgggtttcatttggtctggactgtctaggctcaaatccagtcactggttatgtaaccttgggcacagtacctagtctcttggcctcagtttcctcaccgcataaagttgtgggaattaaatgatttaatttttgtaaagcactgagaacagaggactggataggagcttatcattgttatcatcatttaaaaaaactcttcaaacatttttatatttaaagatggcatcaaaagtttttgtttgtttttagttaaatagcaaatattatcacaaacagctttgcttaaaactagaaaggaagatggccttaggaaaaaggactatgtgaatgtttaggtatctccttcctgaataaagggaataggaagccatactggaaggcccttcattgacaaactgtgtttcagctaatatttttgttgtgtaaacaacccagacaaacacacatgttctttgcattattttccaggacttaggggcaaaagcacatgtatataaaagatgtatcgagatagatctgtaatctatgggcctagcaaacagagtttttaaattcccagttaaaattccctactaaggctgggtgctgtggctcacgcctgtaatcccagcactttgggaggccaaggtgggtggatcacctaaggtcagaagttcgagatcagcctggcgaacatggtgaaacctcatctctactaaaaatacaaaaattagcctggcatggtggtgcgcgcctgtaatcccagctactcaggaggctgaggcaggagaattgcttgaacctgggaggcggaggttatggtgcgccgagattgcgccactgcactccaacctgggtgacagagtgaaactccatctcaaaaaaaaaaaaaaagcaaaaagaaaaaaaaagtaaaattccctaccaacaatacctctagaatagcatttatttttcttactctgaagaaatgaggtatttttaatcataggtactcttaactccctatttgtattagtccgttttcatgttggtgaaaaagacatacccgagactgggcaatttacaaaagaaagaggtttaatggttccacatggctggggaggcctcacaatcatggtggaaggcaaggaggatcaagtaacatcttacatggatggtggcaggcaaaaggagagagagcttgtgtggggaaacttccctttgtaaaaccatcagatctcatgggacttattcaccatcacgagaacagcactagaaagacctgctcccatgattcggttacctcccactggatccctaccacaacatgtgggaattcaagatgagattttggtggcttcgtagccaaaccatatcattatttgaataaaaacaaagtttgaattctgctgaagctaatccagtgtttaaaactttaggagagaattcaacttgaacatccatgagcagtttaactttatttttttatgtattgcgtctctgttttcctctagcagtgttcacactgagcttgtgtgtttgtgtgttttgtgtggcagtggcatttttttttcttttttgagatggagtcttgctctgtcacccaggctggagtgcagtggtgtgatctcggctcactgcaacctctgcctcccaggttcaagcaattctcctgcttcagcctcccgagtagctgggactacaggcacatgccaccacacccggctattttttatatttttagtagagatgaggtttcaccatattggtcaggctggtatcaaacttctgacctcgtgacccacctgcctcggcctcccgaactgctgggattacaggcgtgagccaccgtgcctggccgagctaatgtttttatattaatattaaaaaaaagtgtgagctaagaagaaatttaaaagattttgttgtcttcaactgcataaatagatttcagtggcctagtgaagcagaagactgggtagaagttgagtttcatttttaaaaaatatatacacgctttattgcatcattaatgtaaaatgtgatttcttccatgttattttagatatatcttaaactagtgtttttcatttaaaattattattgtatcatagaatatcaaaataatgaaatatatctataggattttcatgaggtataaactttgtcctgtgacaacttacattataagtataatagagacaagcagtaaatgaaattcatatctaaactattttcaattctgctaatccattatcacaaaaacagtaataacacattagctaacatttttggggtgcttaccttgtggcaagcatagtgttacatatttcacaagtaatttcttatttattttcacaactttaatacaaggaaaactgaggatgttaaatccagaaagctagggattagagtagttaatcccttgacaaattacatgctttagtaaataatagcatcagtctctattttataatgtattttataggctagtgattgaatagttttttttttctgtgtcatagtatctgaatcaaagctactatgctgtggtacaatgcagttctccaaatccctaatacaagagagttgtgatttgtgtctctaagggggccagtatagcatagtggcttagagtatgggctctggagtcagggctagactcacagggttgggatcctaactcaaccaccttcaagctatatgtccctggcaaaattccctaactttattgtgtttcagtttcctcatatgcataatggtgaagataatagtatctgcggggaaccacagacactggaccctatttgagggtagagattgggaggggggagaggaacagataaaaacaattattgtgtattaggcttagtacctgggtgatgaaataatctataacaagctcctgtgacacgattttacctatagaacaaacctgaactgtacccctgaacctaagaaaaaaaaaaaacctgacaaatagagccagggaaggtcatgaagagagggttctcatgcttgaatgtgtgatttagaaaagaaagaaaagaaaactctacaaaaaccacaaacctgcacaaagaccatcacagcctacacaataatacttctacaggaacacctatctagcacctggcctgtccaatattgttattgatctttgtagacaagaataatgattgcacaacaattatgtaatccttctcattttttcctttaaaaattgttgtcttcctttaactctctgaatacgcacatagtttactattgcatgcattttcccattgccatgctctattctcaagtaaacatcttttcttaaaaataaaaaaaaaagatagtagtatctgcatcttggagttatagtgaggagtgaaatgggttaaatacttgcaatacacttaaaacagtacttgcccttagcaagcagtgagttgatattagctcccattatttctatcacctagacataagttatttaagattaaaagtagatgagtaacttaatgaaaatgttacagtgtctgaattttttcccatgatggagagccgtcactggcaaagacaaatctggggaaaccgcccgatgaagaaaatactttagtgggatttgtttggtgacttgagaacaacatgtcttgagatgggtagccttggatggggccctgccctgagctgtcactgttcaagtcaaatgtccgttctctgtatggttttagagtattgtggtatttgtaatattctggcttggcagttctgtctcccatggtgaatgggctgagaatctgtatggtggatgggggtgtagttttctcctgaatgcaccagagatgtgtgtttctctattgcttgcattttgctaagagcagaggtttataagacagggattccagagcagtgtggagggcagagataataacacacaatttgccaattcagtttggtaaagtagagatccaaagtgcattttaccctctgaaaggttttattttaagcactttttaggtactaactcatttaattctcacaacaatcctacgaggtaggtaccatattatgaacattttatggatgaggacacagaggcacagagagattaaagtagcttgttcaaggtcatccagctcttaaatagctgagccaggatttgaacaaatgcagtgaggcggtcaagctccagaatccctactcctaattactatactacagtaaggacataaatcccttcacatgcctcaaactgcaaaacctgggaatggcagaaatgatatctttcatattaaagaaaaaggcatgatctcttgtttattaacatcgatatttgtcacatagccatggtttggcaatgtttatttcttttaaacagacattattgcaagctacgctggatattgtagagacggaaacaagtaaggaaaactcacccaattatgggctcttactgctttgggcttctctgtctaatgctgttcctgtaagtatattagtaaagtatgagttacgttgctctccactgtcctttcatctttttttccttcatttctgtcttccattcttttttccactcatcactcattatggaaaagaaaaaaactacagtggatttggttgtgagataaaaaccaaaactgaatgcctaatgaaatctgattaggttacaaaggagacgaaacagatctcaagcaaattctgtcctctgaaaggcagtgtgtaacaggatgagggaaaagcttgccctttggggccagttgtagacaacatctgtttatggaacactttttgtatgtctaccaatgtgctcagtattggtattgaaaagatgaatagggattggccacatgcttttattggaaagagtaagtaaatggatagtttcaggtaacttgggcttggatccagacatcccaatttgtagttgtagactgtcatggtggtaatttaaattttctgtgcctccatttcctaataagagataatgtactattttacctaataagggtaaaaaaagggataatgtatgtgaacctcccactgtggtcttagaacttgggtgctcaataaatggtaattctcatttctctacaaagttgttatgaggatttaataagataagcctagctggtatcaatgaatattagctctttctctccatttgtacccattctccttctgtgtgccattcctgtttgcattgcttagcattatggtcctacaagcttccgcatgaatggtgctggtgaaattggaactttcaacacttctaaagagaggcaagacttaaaaaactgttttttgtgggtttttttgttgttgttgttgttttgttttgttttgtttttttgagatggtgtctcattctatcacccaggctggagtgcaatggcgtgatctcggctcactgcaacctctgcttcccgggttcaagcgattcccctgcctcagcctcctgagcagctgggattacatgcgtgagctactgggcccggctaaaaaactgtttcttttaaaatctgtcttgcattagattagagccatgagatttgtctgtcacgtcatgttcagtgccaacagtttcctgggccaggaggttctcacattagcctaagatgctacttatattatctgaaattaaagggtaactttttaaatatacttgttttctactaaacaggaggatttaacctatccatgatgatatgtgtgggcatttttcttcctttttcttctaacagatagaaattaggaagatgttttaagtattatttatttagccttacttttataaaggcctaggttgttaaaggctttctcagtcatgatattctagtttcccttaacttgttgaaaaatttactgcataaagagaagggatagaaattctggcctcttttctcaaaggtatgttagccagtggaatatacatttcatctgatatggtcaagtaaaagtagtctaaacccttccccttctttatgtacctataatattcttctctggtttttccttaaataatattcttggaaactgattaagctatagcaaaattgagaaacaaacatcaaaacaactctcaaagtagcaacaaaacaggcactcctgtcaaagaattatttttcaatatcttgttagaaacatcccccggaagaaagacacacaaagccccattgatctgacacaggggaagtcggttctttggaatttgttcttggcgctggtctgaaaggatttaaatcattcatttcagaaagaaagtgtctgatgattagagaatattccatctcactggctcttgttggcacctccaagaggcagcctggtgagcaggcagagatcctggagaggctttagagtcagatccaaagccaattgccagcactgggtaacagtgggccaattgtttaacctgcccaagcctcagtgcccttatctgtaaaatgggattaatgctatacctaccttaaagggttgttgtaaggattattttggtaagaaatagattgtggctaatagcacctggttcagcataggtcttcaataaatgctagttttcttcccttacaaaaattatctccctagtttcagtcaatcattattttcaatggcccgttaatactgaacataggcttccaaatatttgatggctcaaaggccccagagtgggaatatccactgctattctgctttagtgacctttattgctgctgagaataccagaagccctaccagaggtgtaggtggtggggcctgtcttttcctggagcccagagtatatctatatctcctctctcctactttgtactctgcctcaaggcccataggactcagagctcaggcttcagatgggttaggcactgggtcactaggaggctccattgtggcccaagatattaactataatttatgaaattatttttatgggaaaaccatttctaagttccaagaaatttctgactgccaaatgatttttttagaagatttctccaaaccaatcacaaagctgacattttaccttttttatctgctgcatctcttacattctttctaaatactttcagtagcaattgctaccccatcccactctcaactcccacagtatttattttttgtaacatgtgtttgctctctcactgtcttgtacatttcgttcatttttctccaatatgtattcatatgcccaactaaatgtgaaaatactttggacaggaattatctcccaacatatttgtgtttaccatgatcggtagaagactctctggcatggtatgaagactccatcaaaatctctttttgaatagataaatcagtaccaaagaacacactcaattcatcttctctttgacacagcaaagatacagagttttcctccttgccctttctctcatttgttcttacctctccaaaacaatggaatgacattatggtggctgcttctgcagttcagtgagctgagtggcccttcttcttcttgcccatctctgaccttggacttgaactgttttacaaaatactaattggtactgttgggagcagttttcaacccctttcccaaatgtgggtgcacaaagacctcaaagtcacttattcttgcttattgatgtagtaatacatataaacttttattaactattttatatgcctttttatcttttaaaaatactttggcttttttaaaaatagaaaaaattttaaaaactgtaatctgttaaggaaaaaggagacattaaaaaaaagtggctcacgcctgtaataccagcacttcgggaggctgaggcgggcggatcacaaggtcaggagatcgagatcatcctagctaacacggtgaaaccctgtctctactaaaaatacaaaaaattagccatgcgtggtggcaggtgtttgtagtcccagctactcggaaggctgaggcagaagaatggtgtgaacccaggaggcggagcttgcagtgagccgagattgcgccactgcactccagcctaggcaacagagcgagactctgtctcaaaaaaaaaaaaaataaataaaagtaacagccatttgtagtttagctaaattgcttatgtttgtcatttaaaaagtagtatccaattttattgaatctctaaagctatatttaggcacatacaactatgaacatccgttttgcgtaactgaaaatctaagtaatatggcttggctctgtgtacccacccgcatctcatcttgaattgtaatccccacatgtaaagggagggacctggtgggaggtgattggataatggggacagttttccccaggctgtccttgtgatagtgagtgagttctcataatatctgatgctttaaaagtgtttggccattttccccacccccttcttctgccaccgtgtaagatgtgccttgcttcccatttgccttctgccatgattgtaagtttcctgaggcctccccacccatgcagaactgtgagtcagttgaacctcttttgtttataaattacccagtctcagggaattctttataaagaagtgtgaaaacagactaatacattatgtcttatcactatttttttccccaacatgaactctgactcttcaagtaagatgaagtgagtatggagtagttattaattgaattcagtaatttagcacttttatctgtagttaatagtagaaagggggcctgagtagagacaggacaagatagttctctgagcatctgtttcatcatctgtaaaaatgaactagaaaatctctaggataaatctttcttaatctggataacactcctgaaagaaagcctctaaattgaggacccttggttcccctattcacatcgtttatgtaaacagtaccatatttatccttgcactatcaatttaaagttagaaagggaaaaataatgaacagtattgaatttggcttatttgagcacttcttttcggacaattgctcttcctcttttgaccacagaggggagtattggtattatttaaaggtacataatgttacctcacaaaagagacagactaaatttagtcaaaatattgcatgaatcatttcaggaccaattttcctagatgaaatctctttcataataaatgtatttagaaaaaaatgaaagtgaagcccacacttctttggatgattttatacaggttttctttattacgtaacctaagaatagaagcaaaactatttacctgaggaggaagttaatttttaagatgtaaagcagtatgattttatcttgtaataccacaacgaggaaagatatgaaataagtttgagtggccaagagagaaaatgtgcaaatatactatattcaatagcattcaagtgtgaaaggactcaaaaattttttttcttttatttactaattcagagccaaaaaaagccaaaaaaaaggactttgtttttgacattgagtactctcataatttagtttacgggatggtttcctgctgcattttcctgggcttatttaaaactactgtgtttcagttgcagaatataaaatgtgctaattcacttgtattctaaggaaattaaatcttaagaaatgtttttgttttggattaatattcttaagtgtcataactagttgcttctgaaaatttaatatatgcctatataatattttgtgttactcattagtaaaaataacaacttttctcatttttagtgaagatagatgtttaatctatttaaattatatagttaaattatagtgacaaaataaaaatttaaatctggcttcttggagatatattacatatctcttattaataatatctagttgttttcaaaatatgctttctactaatgtgctcttaaggttaatttaaacatcatcctttttaaaaaatatatgtatggctaatactaaatatgcttttgttcaccttcaaagaagttcatatttttgatatatgtttttctttttaaggttgcattttggacacttgcatacgtcctttctcatcctgatatccacaaggccattatggaaggcatatcttctgtgtttggcaaagcaggtactaaaccttattatataggaagacacagctaataatgcatgtttgtcacacattattggcaaagctaaatacctataattttataaaaattcaacataatccaaaattcaacataatttgttatatatcaggatataaattgatcaggtagaatcctagagtttaattactgtcaagcatatttttgtgcaactccttcattttccaaatgatgaaatcagtgctatagagattgtgatttgcctaatttccttacttaaatatatatacacctgtttgttcttctaatgtcttggatcctcacctcaattgaatgaatgtccacagttttcaagttcaggatttttcagattttataaaagtaataagggtatattccatatattacataagagccctaataggactgtagaggtcaggtaaggcttgctaccaaaggattattaaaagacaacaaacaaaaaacaagtaaacaaaaagaaataaaaaaacccttatggttgttagaaatttgaggatttaggaactgcaaatagggattgttgccttgaactctttagttcagatgtcagctgtttatttatcatctcttttaaaaagcaaatacaagcttgaatagagagtactcaactacttgtatattcagcataatttgaccaatctggggagttgacttttttaaacttcttaatatgtcgtattatgtatcctgatataaaaagaataagaaatgatagggttttcttggaagaaaacaatataatattagggcaaaaggtatgatgccagttaatggttttccctctcccttccatgattactgaaaatattttatttaaagtttttttttttggattgcttcttatggagttaaaccaaaaagtaaactggcttggcaaccatgaatatctaagtaatattgtctgagccttgagtatgcgtcagcagatgctggaccttatagaaatggtgagcatcattatcattgaatgccaacaatgctaacaggttagattctggaaagacactggtgaatataagagaagacaactggcctttgtgcagcttgcatctacaaaacaaatagaaaggcacatgcccacatgtctacaaatggaaaaaggcaatgcactcttgattgtcacatattctcctttatcatttccttactagagtcttttcctgacttagggtactccaaatttgtggctttaggaaataaaagagtagagaggggatgatggggataacgtggggggtcctctctgacccaaaggccacaacagaagtgtaacattaatctaaatttctacaaggcttgattctagaactcttgaacccagttctagtggagaaagattaaaacctttttgctttttctatgttattgtttatttttaaaacccattgttctcttctgacacaaaaaatgctccttcgaatagtactaccactgcaacagctacattatatggatgctttcagtctataagacactactgcagaattgaaaactatttatgaaagacatcaaactttttttttaaccatacttatacagaagctattcaataatccatacataagatctagtagcagctcaggaatttaaatgttgtgagaggagtccacagatctttggaagctgatatcaaggaagatatccatgtgtccatacaaaggattctgtcaaggaaggaacatttaagtacattcgattagtcaggattctccagagaaatggaaccaattaggatgtaaatagatacatagataaagagagagagaaaactcaaaagacatttattataaaaaattggctgacctgactatggaggctgaggagtcccatgatgtgctgttgatgcaggctctcagtggattggatggtgcacacttacattagggagggaagcctactttactgagcccactaattcaaatactcatctgtcatccagaaacaccctcacagacacacccagaataatggttaaactgaataccccatggccagtcaagttaacatatagaattaaccatcatctaggcatcatctaatctgttgagttttgtttctctggagaaccctgagtaaatttacccacccacatataggagggcagtctgccctactcagtctactgattgaaatgctaatatcaactagtaataccctcacagacacacccagaaataatgtttagtcaaatatctgggcacccccgatccagtcaagttacatgtacaaattatcatcacaggcatggaacaggaatctgactcagcacagcagtttttctgttctatgctcttgtctcccgcaagatcaccatttccttcttgggaaagtcttttatgaatttccaatgctgtatctctgtggcttcaacactcacttctaggcactttgcccaactttcttataaaacaaatctcagggtaaaaactactattgaatacttgcgaaaggaaagggtcagactcataccacttttctaaaggcagttagttcttgaactatcttgatagctgcctttcagcctactcttgtgttctctatttgtttactttaaaatgaaagctttttggggctcctttgtgaagatgcttgcttagccccaattattttgggtggtgcttttcattattctacttcctctaactaatcctgtacaccttctatctaagtctttattatctaagtctttattatcttcctaagtcttcattatctgcttcttccttttcttgttttacagctgtgtttttattttttaattgcacactttttaatttactttttagcaacagggtctcactttgtcacctggagtacagtggaatgatcatagctcactacagcctcgagctcctgggctcaagtgatcctcctgccacagcctcctgagtagctaggaccacaagtgtgtgccagcatattgggcttcattttttttaatgggacattggggcagaggaaggtagaagtgcgttctcaggttgtcatcttgagctataagtttgtgtgcatgtaacatgcatcaacttataaataaaattatatatatataatcatagataattaacataccataaaatttatcctttcaaagtgtgaaatgtagtagtttttagtatatttataagattgcaaccatcaacactgtctagtcccagaacatttttatcaccttcaaaataaatcccatacccattaggagtcactttctgtttccttctatttctagcttctgacgaccattaatttacttattgtcctgacacatttgccttttgtggacagtccatataaatggaaacatatgatatgtggtcctttgtgtctggctcctttcgtctagtgtacagttttatattataatgttttacattaattgattttcaggtcttgaagcatccatgcatttctggaataaatcctgcttaatcctcatgtataattttctttatatgttgctagattcagtttgctagtattttttgaagtattttttttgaagaatctatgttaataaggaatattgacttataattttcttttcttaaaataactttgtctggttttggtatcaagataattctggctttagagagtgtatttcttcctcttctaatttttgaaagaggttatgaaagattgatattatttcttctttaaacatatggtagaattcaccaatgaagtgatctggtcctaagattttctttttgagaagttttttgattaattcagtctttctacttgttactggtctatttagattatctatttcttcttgagtcagttttatactttatgtctttttaggactatgtccatttcatctagattatctaatttgttggtataaaatttttcatagtgttccacacaatccattttatttctgtaagggcactagaaaaccaaatatttcattcctgattttagtttgggtcctgttttaccttctgggtcattgtagctatatatttgtcaattttgttttcaaagaactcactttttaattttgtttattttaacttgattttatttttcctagtgatttttgtatttaattttgttctaatctttacaatttctctatttagttctttagaaaagatttccttagttctttgaacataatgaaaatatctgatttaaaatctttgttaagtccagcaacagtttcttcagggaggctttctgttgattcctttttttcctctgtgaataatctattcagacagtcttctacttatagtggttcaactcttgattttttaactttatgattgtgtgaaagtgatacacattcaacactgtattttcttatttcatgtcttatttcatgtttcttattatatgccttataattctttgttgaaaactggacattttaaataatagaatgtaacaactttggaaattagattcttccctttcctcagggtttgttgttgttgctgtttattgttcttgttgtttgtttgtttagtgactttccttaactaattctgtaatgtttgcattctttgtcatgggtggccacagaagtctctgctccattatttagtgatcaggtattaactagacagatatttctttacctcagtaatttagaagtccccattctttgctaagggactgtgtgtgcatgttggccatgccttcaacactcagccaagcagttgacaactctgccttagctttcgctttctacctgtgccagagcctcaaggatgggtgtacatgacagcttgtggccttctcatgtctttcctgaacatgagtaaagccctgggcaaatggatgcccttctaaattcctgggaattcattagacctctgcaaagccactatgaacaactcattccctagcctttcattttcatcttgttggtttgcctgttgtttgtccaacagttacctactgactcagatagttgcaaagttaaacagttgtctttaaatattttaaaccaacacccctggaggaaaggcttttcatactgagtgagctccaagtcatgtcaaataaagacagtcttgcaagtaaggtcttctaggaaactgccaaacttgtcgcataatgagaatactgtagtactgaggtttagaagaagttccaaccttgttgtgccctatctagtgactgtgggttgttgattttcactgtgaatgcagacttctggcttttaaggcttctatggagatataaagaggggtttgagaatagggcaggttaaaatgatgttaagcttgatgttcttatcaagattcaactgtttttttcttgaatagacattcttgaattgctgcaaaactttggttaatctgtagaattctaaaaacttgatacttagaatttttaccaaatttcttattgcttttaaggagggaactttaggagatccttgctctgctatttttactgacatcaccctgaaatataagttttaaaatttctttggaaaacctcccaggcttatgtggattaacccttaattcatccattattttacttggccctcaaacttattttttgagtgctcaccatgtgaaggcattgtgtgaagtaccagagctatgaagatgagtaaagtaacagtccatgttcttgcagaaacttatgaactaagtgctttttataaaaattgaagacaggtttggaagtatccagaagatattaggagagaaaaaggaatatttacattgtttctttggagacatgtacctactggtaaattcagtaagattcctgtgcctggaactctttctcttactaatctttcagtcagcttgaatgtctcctcttcagatagatattttagtcttaccccatctaaagtcactttccccaactctgcccttggtgattctctgacttgtcttactctatatttccttaaaagtaagacaagttagagaatcactaacttttaaaaatattttttatttgtgtatttatgtatttaccccaccaaaatgcaacgtctccaacaacagaaactaaacatagttggtctttgtagtacctagctgcctagaacttaaaaattattcaacaactatttactgaatgagtttaatgaacaaatgtaagaatatatggctagttttaagagataagtatcttggtctagcctctgtttgcagctctatcaaccatcccatttgacattttatatgaaacgaatgttttatataaagactttttgacagttttctgcactgaattttgagttagcagaaccctattgtatgatggtcagtcagttgggagccacaaaaggagctagatcctttattaggatttccacaggaaaggcagagaagggacaagtcaacagtttagcattagctagtttgaataatccccaggggctctaaactgtagagtggtttctagtggcctgatatctggccctgagatgattaaggcagaggaatattgcttcttgggttatctgggccagatagaagggtgtagttctagattggttgatttgcatgtcaaaggtatgctccaggctgagttctgtgccaactggaagaactagcttgccccgagagggagaggagcaatctctccccagccaggaaggttttctgtttcttttaaagatgttatacatttaagaaatattattttaaaaaaatttacacacccacacaaatcattatatacagaaaattaaaaaaaaatacgtaatacacctagtcccagccaatatcttatcagtactttgagacactgagtaatttcaagcccagtaatccgtatgaatggtaaataatgttaacttttctctaggtttttgatctctgtaaagcattttttttgcctatggttttattttgttccttaattttgggtgaaacatatattaccaaatcattgatgatctgataaagaatatttttgctttgttatcaaattttggggtataattcctagaaattagtctttttgttttaaattttaattgataagttactacacattatttcaattgcctgtcataacctcataatgtagtgtggacactagggtcagactgcctgagttgaaatccaggtggagacacttattaatggtgtatctttactcaagttatcaagttctttaagcctttttcctctttgggaagatggttaataataatcctcatctcgtgaagttattagaaggatataacacatgtaaattagatagatagcgtagtacctggcaaatcgtaattgctttgtaagtcttagctatggccaaaactgatacaactatatcagttatatgaaattttataatcctcccacatcatgaaattagtaactgttgtaactttgagtttttctacttccaaatattagtcagtgttgttttttgaaataagatagttttgttgaatgtttatagtcagaaatgaattactttcatatgaattggctgtacttttggtggtgtcaaaatgcagcagaaatatagcatgagactatttatgtctaatattgccctacaagataggagtagtagaaacagtaatagttaatagtcagcgctaattaagtagcaggccctattttaagtgctttccttgttggcttatttaatccttggatcatccttcctaaacattattgtttgccctattttatgcacgaggaatgtgaaatcccaattagataacttacctaagaccatacagctagcaagtggtaggggtgtgagttgagcctagtttgtttggcatgaaagttgacaatacaaatcagcaaatctccttgtttcaaaattgtacttagaatccctgaattatgatgcttcaatccaatttccagctttattctgttccaagttgcttccactttaatcttcctaaagcatagctctggaggtatgctatatgtatactcagaaaatgttcctggagtaacattcatacccctgagcctgatacctgtggccatgatggtaggtttgacccacttttgcatgcagaatcacaatctaaccaaggtagactttggaatacccactaaaaacactctgcattttgtttctgctatgtattaacatttataacactgaatatgatttaattctaatatagttataaaactttacatataagtaaacttatagattagagaaaaacattttctaagccattcacctcatttttgattcaaaaaatatgactaccatatttataacccagttgttttccaaaacaatatgatgtgtctgccaagacaatagaattacccaaagaaattaagggccacttaaccagggcactttaaccagagcgatggtctgtagtttatgtagacaatcatctttacttgttgcatacctataccttcttctgaccaaggccacctggacatgtagatcccaacccccctaattacctctaagattttgttccattgatcgatcgccaatctcttggtgggttcaacttctctttctccactggctcttttctctctctctgtcagattgtggtattcagtgcacacatccagtgacctcacatctcactcagaatgaaatctaaagccttcaaatggcctcagagactctttgtcatctgattcctgtctaactcaacgacctcatctctgccctttcatccttgtttattttaccccagccacacccattcatttattaattcagcaaatatttgttgcactcccgttatatgacagggactgctttaggaacttggaaatatgaacaaagtaaatattacttttttcttggtgcttacattcttgtagaggatacagacaattaacaataaatgtaatacataagtaaactctaaaagtaaaaatattaaaaggtgataaatgggtgggcatgatggctcatgcctataattccagagctttgggattgcttgatgcattcaagaccatcctgggtaatataatgaggctccatctcttaaaaaaattgttagctgggcatggtgccatgcacctgtggttctagctactcaggaggctgaggtgggaggattgacctgagtccaggaattcaaagttgcagtgagctaagtttgctccattgcactccaggctgggcaacagagcaagatgaaggaaggaaggaaggaaggaagaaaggaaggaaggaagggagggagggagggagggagggagggagggagggagggagggagggagggaaagaagaaagaaagaaagaaagaaagaaaaaagaaagaaagaaagaaagaaagaaagaaagaaagaaagaaaagaaagagaaagaaagaaaggaaagaagggagggagggatggagggagggaaagagagagaaaagaaaagaaaagaaagaggagaaaggagggagggagggggggggggagggagggaaaggctagagaaaatcaggaatgtcagggatgggggaaggtggtattatagtattaaatagaatcagtgtaagccctaattggcaaagtgagatttgagcaaggactttaagatgttaagagttagacaagcagatatctagaggaagagctgattggggtcagagacagcagatgtggcctcactgtgggctcacaaaactctttgagatcaccatcatgatggcatttctgttggaagatgtttgtccttttttttttttattccagaggagaatgtgagcacatttctaaaaaatggttaatattaggttggaagaagagattcaggaaaaagcttttctttctttgtcacattattcaaagcaaaatttgattcaactctcaatgcgtggatttttaaataaaaaaaagaggatgagcatttggttttgattcagaaaatatgactaccattcagaaaatatgacaccagtacacaggtgttctagttaattattgcactgttttaaaaaactgtcattagacaagtttgaagtatcatgagaaaggtggggagatatcattgtacttagtctgcttttatagagtctttaagcgaggggtcactagcctgggaatagacaaggagtgtatttgtatatatacacacagacatgtgcatatataaatatatgttatgtttataaaaaggtatatagttatagttataaaatgtatttatatttataaaaatatatgttcataatgatataatatattttttatactcatatatattatttacaaacacacatattgatacgtatccatttttggccacgcaaaatctgaaccctatgtttcaacagaaacttgcctaccatagtgggcagaaaaatgctagatttttgttttccttgccttccttgaaactaggatattaccatgaaaataagactttgccattcagatctaccaacccaagactttgaatcaagagttactgaaataaagaaatggagactaaaaaattttccctggaagcaactgcaggtattgcaggatgaagtttctggggacacagcgtcattcagtatcctatgccagtggccacaatgcacttgacatcagtggcagtgtcatgcttgccagaccagttctgtggcctgatttggagcaagattcctggctatgcatccttcaagcctggttgtccagccctcttaaaagttacataaactacttaacaaacttttaataaattattattattttactaaatcagctaggtttagttctgctgcttgcctctaacagatcttgctgataaaatatagaaagtgtaatgatcagaatgtccaatatggagaaaaaagtagaagtgacaaagtcagctatcaggaaaagtgaatggagccaaaggagaaaatgagcatactctcctgtggtggtataaggggtaagatgaagaagaaaagacacatctatccagattttatgctgtgatcaatgtacagtggactttttacattggaaatgtctgtaggaagcagaaagtcaggtgaaaagagaactgtgaaagccatgaatccagcaggttcttgtgtgatggaaactcggaaggactagggatatacttccatgacacctctcctctttgtatgtcctctctaaatatggtaaatcaagttatttggctggtgcaaaagtaatggtggtgtttgccattagtttatttaccttatttagagaggatgtataaagaggagaagatgtaatggcttccatcaccactgagacatttcttcctcctgtagagttttatgtattctcaatatggtgaatattattgtatccacagagctgaagaataaagttatctatctttttactttgacattaagctatttagtatcacagattccattttatttatttaaatatttacattttaatttgtttaaggaggatttcatcagcctaccattatggtttacctttctattttaattaaaatataattttatttaaatatttagagtacatatttagatgtggtgggtttttttttttttgcttctttgtgttttgtttttttcaaaataactactaaagtaataccagattgtaaaagattaattgacagcgtaagtactcacacttatgggtaactgacctaaagcaatcaaagacattaatgtttagctcctgtgtaggctgtgttataaagtaattttcatttctaattcagggctcccactgtgagaatctgcccatcaatagaggctcattctttcctaaaaaaaaaaacaaacaaataaaaatgtgctggaatttttttcacttttgcatttgacttttccacctatgctttttaacataggatagcatacacatgcacccattttattttatttttttgctgatcagttttactttgcctttatttaaacaataaattaataaacattttctgttaatttgcaaggaaccagattaattaatagaaatgcacctgcatagaaatgattcctattttacataaaagtcatgatttatgcatcataaaaggcacatacagaattttcattggattagagagttagcagttggattcatgaatttcaatcttgtcactcactaattgtgtaattgtggatgaaagagaaaccttgctcagagccaatcaacagtggtttttggtaccactgtgttttgatttagcagcaatcctgactagggatataccaacactgtgggatggccagcgtctgttacctggtgacattgacttaggtagctacacgttatacactggtgaggaaagcgtctgactcttctcataaatacaaacaagtataaacactagtaaagtgaaaagtgatattctaggtaaactccatattgtctgctttattttaattagttgattagttttactttattgcatttaagcatctgtatttattcttgaaatcttatatattgtcattgtttacccatattataacttgtatgcagcttcccttcacttgggtgtgtctcagcaccatcttgccaaccaataacaaccttcttggaggactccatcatggcatattgtagacctgagtcccttcagtgaacttaagctcatgctcactacccaactgcagcctgccagggcccaatggctgatggccaaagttgtgtctgtgacagattcttggccccttgtgcgatgcattgcccaaaataatgaagaaagagatcaaggagcagagccaaggacgctccagtggaattgtgaacagaaggaagttattttattttaaaaaattatctccattcccaccagtagcctgacattatgaacctaacacagagatttgggaggctatagcttatcatgcaggaaatttctcacatagcctcatttacctttgctagcctagcttttaaaatccaagaatggacccaggaaattgtagattatggaggagcttcttacaaactacttctcatttatcaaccttgaagaccacatatagattacttaaaaaagtatttataaatgcaagaaagttcatttgaaactattctttctaccccaaatatacagtttggctatcttcttattcccttggccttgaagatcaggatgatgtcattttggaactcataacttgtgattttcctatctactaacctagccataatgactagggtgagacttgcgtgtctaatacctggcccaggagagatttctcaggaagctttatttcttccactgttttctacctttaatacccaaagtgggtcttgtgataccctagctcaagagattttgtgtgaagtcactctctcctttttcattgcttagcttcagtggctgaaagagatgcctctgatagctgtagattatttgatatccctgttcatatttataagcttggagataggttctactctggtgcctctcattttaaatctttcactatcttattctggggcagcactgttgatctgctttatttgttctctacattttttcatttagacacaattctttcttcagagcattctgttggtgaatttttcaaacatttggataatcttttttttattctttaggaaatactaaggtaaaaactattaaagtcaggctgacatctctccagagaacataaaccaaaaatttggactcagactcagtacactggctttatacataagggtatttctagatcaaaatttatttcacatattattatctacccactgttatcttctttaggcaatattctctcccttttatttatcatgtattggactatatcctttattccttgaaaaaaaatcatgattatgaggcatgctccatttttgtcctccagtagttagagaaattgataatctcttttttaaaatatgagagaagcacttcttaaaataacaccaaatattatttttcagagtagaatcttatatggttgacttggtatagtggcattgaacttcttttgacatgatagaatgggatttgggatatttaatatgtgcacgtactgatggaagaaagagttgggagggtcagcctgtcaattctccttatcttccattggatgtaataacctgttctcagaaacgttgcagtcagtccttcatatctttcgcactccattgttatcactgccttttccaggctttgcctattgttatgaatgtcaaactgaaacagctgagcaggatctacttccaaaaggttattacttgtaatttttcaataggaatatgtctttgataataaaatcttatcctaaatccttcacatgccaaaaggccatatccatccttgtaaaagtcagaactagagctgaaggccagaaatgactgagatgcttggaagaagctggtggctggaggaggagagtagaaacatgtgtggtttgccaggctactgctacaatccctgaggccccagtgctcatattcccagagtccatggacaatctctaggcttattatttgctctccccagtctgtattcaccacagatactttaagctgctttttaagccttccttctcatgttacatctctccttcctattcatttaactggtatttctcttgcataaagaaatcagactggggcaggacctatatggaggaaactacaagatttttaaaatatgtatgttttaaaacaatctaaataaagaaaaaggcatatcaccttcctggatgggaagatttaatatgaaaatacacttttcagattactgtacatataatgagaattccatttttgggggagtgtagttagctaaatgatttaaaactatatagaaaaataactgtgattataaataaaaattattagaaatgtgaccaggtgccgtggctcacacctgtaatcccggcactttgggagactgagatgggaggatggcttgagaccaggagtttgagaccagcctgggcaacatagtgagattgtctctatgaaaattaaaaaataaaatttagtcggatgtggtggcatgcatctgtagtcccagctacttgggatgctgaggtgggaggatcacttgaacccaagagttcgaggctgcagtgatttatgatagtgccactgcactccagcctgggcaacaaagtgagaccccatctctttgtatacgtgaaatgtaaattagtaaggccagattcaccctaattaaggccagattttaataagttattaaagcttattataaaactgctataacaaaagagtacacaattggcacaggaaaaacaattgatccacataacccttgtgtatcttttaccaataaaaatcaactttataatcttctctttcaaaactaaaactgtgggtaaatagtttttttaaaaaattgtttcacattgtcaagacaaaatttcccaaacgatctacatttggaaagaattaatattctagaaacctgcactcaatggagagaacctataaagaatttgcggggatagcggtgagtgaaaagacatttaacttcacagctaccatcatgatctttcatctgctgtcatcccctcttccttgaattttctataatttgacttattatctttcccatagatattttatcttacacaacatgtataataataaacgtgtgcaattacaaaagagataaaagttttttaagaaacaacaaacccaaatagtaaatcatttttctttgttaaagcaatatttgggaggtaatatagagtattgatttttatattgaatttttgaagggtctctcagcacagtaagcttacaagttgcttggaatgatagcacaagccttgtgtgttaaagaaggctggaatagcttatattttacatatgtgtcctcagctctggagcttccctgtgtggacctccttctgtttttcctttcttcattttcaagaggtttctgtgagctctctgactgaggcaacaagacataactaatctccagggacccattctactcttttcaaaaaagataaatcaatttttttgatgttaggaaaatcacatttactgtctactgattttaggtacccaataaatttcttttttttctttttttttttttttgagacggagtctcgctgtcgcccaggctggagtgcagtggcgcggactcagtggcgcggactcagctcactgcaagctccgcctcccgggttcacgccattctcttgcctcagcctcccgagtagctggaactacaggcacccgccaccacgcccggctaattttttttgtatatttagcacagatggggtttcacagtgttagccaggatggtctcgatcttctgacctcgtaatccgcccacctcggcctcccgaagtgctgggattacaggcgtgagcccacggtgcctggccctaaaattgatttttctattcggtaatcaaagatcagtttcacactatttcctttcaaaattaaaagaataattgtacaaaagtgtttattgttttctccatttagagacaagtcaacaaatactcgtctcacaaaaaaattcccacaaatctgtaaccagcccattctcgctatctataaataactgttataaagcctgttgtaggccaggcacgatggctcacgcctataatcccagcactttgggaggccgaggtgggtggatcacctgaggtcaggagttcgagaccagcctggccaatatagtgaaaccccgtctctactaaaaatacataaattagccgggtttgtggcaagtgcctgtagtcccagctactcgggaggctgaggcagtagaattacttgaatccaggaggcggaggttgcaatcagccgagattgtgccactgcactctagcctgggcaacaagagtgagactccgtctcaaaaaaaaaaataaataaataaaataaaacctattgtgaatggtattatctacttcagatattatcacctccgtaagagtgagtatatattttattaaaaaatagatatataattttaaaaaatggaattgctgaacattacttttattgaagttttaaaaattcctgaaatgaagggaaggatgtaagggtctcttttttcccactctagaatactgactattgtaaagttttatttattctttatctttagctttgtctctgttctctaaaaactgactttgtagaatcttatctggaggtctctggttgagaaaataagccagaaatctgaacagttacagttttctgcccttattttctcacaggaattgttgtcattgcttcattatttttgcgtagaagtcatacaaatgctatatattttccaaaactattgaataattttctgaagtgacagtataaacactaattttttataatttggtttttactttttgaagatattactattgtaaaatttgaagagtagatgtattgaccaaatgttgatagaagtcattgctgaaggttattgaatcagtttgtttgtttttcatctattatctcatgtatatttattccaagttcattctccttcatgtgcactatgatcttttgcacacacttcaactttatatattttaaacaagctgttctaggaatatggaaaggcagcctctgagaaggaaaacttagtcatgacacagaggagcaaacagcactgagaattcatgctttcaaaagtaatgaaagaggtggtgaactgtgttggggttgcactctttaaatcttggaaggattttattatttgcatttttttcatcttttcattctgattttcattcttggagaagcacaggggtttcctcagtattcaactccactttgcaaccccaccttctggttcagtctccttgaaattatgtttccaaaggtctgaatgagttagtaaatgcctaccattccccttcttttctggcaaaacatggattatttccccaaagttattagttaaatttttaatgaatattacttcaaagctgtagaaacaattatatgtatatttatttatttacttactatgtctgcatgtatgcatgtgtgtgtgtgtgtgtgtgtgtgtgtagggggaaggggcttgaaatattaaggagctagagaagccatctctcaaagaaggacatcctttagtgattctatttgactcatgttctttttttttttttaagcccaagaaatttttgtgattaattttggaatttaagttagcattctttctgactccaacccatccttccaggcttagttgaaatttcagccctaagtgagaagagacacttgaattctcttatatgaaacttagagatatttatatccaggtattttttgtgtgtgttcttgtttccaggatcctttaaggcagtggccgtgtgtttctcattcccttcttgtctttgaggaagcaatgtggcgtagtagcaaggttgaaggctttcagtatagacagacataggtttgaaggctgctctgatactttcaagcttgtctccttgaacattttaacctctctgaggctcagttagctggcagatatctatgaggaataaatgaagtgatccaaaatatttgtgacattagatgggcaataaattagttttatttcctccctatctcttatagcacctatgcttaggctagcacataacagatatggagcaaatttacattgagtgaatcaatggctaaagtaatagaatttcaatttgttataattattaacaaatataacatatgtaatgtgttataatacacatcattatgagtatgcaatcctaaaactatgtataatgttttataaactttttttgctatttctgaacgcaagaatcatcatttcttttacttgattttcaacatcctaaggtttgccttcatcatgtttatgccaagagttaaacagatggtttctgaattttagcccaaatcactcagtttctttattggtctgtcatctgtactggtccctgtctccattagactgtagcccttttcatgattaccttggcattcttccaagtgaagccttctaattttagagtcacaatgctggaagaacaaatcacagatgtgcattgaagtatgcacagtatgggtacggagctatttctaagagtcatagtaaaaaaggtcttttacactaaagaatcattcgaaaacttagtgtatttccttttctttttctttgtatggtccaagaatgctacattatttttctcacatgacactgacatttgagaaactaaaaatattttatcaaaatatttattttccaaatgtaggctacatctctaatacatttataggtcataattttaaatgttttcaattcaaaacaagcttctgtttctatattattaatatagaacgttttaccctttttaacttactaagagtactttatccaaaaatgtttttctgaaggaggtcaagaacttcaccattactagagtccaaacttttccaagaccagaattatgcaatatgtaggtcactgtggagtctcttggattttcacagatctgatttcaaacacaaactgaccgtagttgccacctatccttggtcaagtagaaagatacttcttttcggcatcctatagctgcagtaaaataaaatagaaaaaaagtagaggaattgtttgattgatttgtccagtgtagatgctgtaaatagattttgagagaaaacaaattttttgaaaagtaagatctagaatttaaattgtaagctactgctaatttatttataatgtccatttgtgaagggccctagcttgctggaaccaccttggtttttaaaataaaggtaaattgtttggaccccatctcaggtttctaattatctttggagggagaaatgggagaggaggcaagaggtagaggcttgtgttttttctagccttctcttgattcctagttcctgcatttgctgattttgcaatttctaaactctttcccttctgcgtgtctgccacgttttctgcattgcattgcctcactggacatcctccagctctttatttcccaaagtgttaagttaatgttagctgattttattaaaatattaaaaatatgggacaaggaaagtaaaaattacattgcagtcagaaacaaaagtcctgtctgccaaagaattttccttgacactctactaggttatcagtgacctatcattgaagctgggccctctctcttcttggaaatccccagctttgtcttccttaccttgcacactggcagccccagttgcctttcacttcctgtgcaaagctgctcactctccctttgtctcaccatggacattcaggggttctaacataggacttcatcttctcatatatactgctaggcagtggttttcttgctttctttttctagagtacattctagaagaagcttgtccaacctgaggtccgcaggccacatgtggcccaggatggctttgaggtttgtgtttgacccaacacaaacttgtaaagtttcttaaaacattatgagattttgcatggaccttttttttttttttaagctcatcagctattgttagtgttagtattttatatgtagcccaatgcaattctttctcctccaatgtggcgcagggaagccaaaagattggatacctgtattctagaagaattttgtatcccctcatagatttttaaattgatgtctaatagttgctatcttatgtttaagtaattgcaaaggatatcattcctggtatattttctacatgttcttagtctatttaaaatacatatcaaaagttacaggtttattatagttcactcagttatgaaaaatgggtgccatataacctaattctcaaagccagttcttattaccaaactaatcatccaatccaatttatcttctaacagaaaaggtctgatttcattctttcaattcaaataaacatgttaatatgtgttgctgtgacactcatctcacttttgaattctgattcgtagatcatcaggtggacaaacatggtttgtaagcaaggactagtggacaaataggtgaaagaagacatgtctgcttttggtatttctttcctgtgcctgttttactttgctctcaagggcttttcccttaggttccatgtgttatctaattgcccttttgtttggcagccaagagatgtttatacctcaaggaaaaagcactagagtaaaaatcgggatagctgagaggcaagatattccatcgtaaagtcaggaaaaggtgattgtattggggagatgggaaaagagaattgggccacagtcttttattcaacagatcagttttagaaaagagtgaatatggaagttgagtatcagggaattgatttccttaacatttgctctcatgtgccctctgggtatgtgaatataattcgaagatgattataatgtattctaaacaaagacattttccttataaaatatagactacctctcagggaaagaaattttccttgtaaaatatagactacctcttagggaaagcatattgtaaaataagcatattttacagggttatccagatactatgctaggcattgtatacttgacttggttatataaatgatatgtacagcgaagactacatagaatttatagtattgtaaaattcaaatgctggaataaaatctggacttctaagcaataggaagtacaatgaggagcaaaccagtagcttgtccccttgatgtcccctaggcaggggcaaactttttctatataaggcagagagtaaatacatagcctttatggaacataaggtctctttcaccactctgctattgtagtgtgaaaacagccatagacgtgtaaacgagtgagtaaaccaaaaagtgtctgagacaggtctcaatcaatttagaggtttattttgccaaggttaaggatgtgcccgggaaaaaggaatacaaaaccacagggacatttgtgagtcctgctttttccaaagagagtttggggacttccatgttcaaaggaggaagaacaggcagtgggggaaagaggaaggggagaaaaaaggaaggagggtagataaaaggggcaaatgcttgcattcttttgggtctttgatcagtgttcactgaatccacattttacatgtgaaagaggtgatagaggaatagtcaactgtatattcatctagcccacagaaaatggtcaatttatataagtaaacatagagtagctacctgtggagacctctggccttctatctgtagctatttgcttaggaacaaaaggaaaggcagttccagcttaatatttccctttggcatagtgaatttgtggtcctgagattttatttttctttcacatttccaataaaacttcatttacaaagtcaagcagtgagctggatttggtctgttggccataatttgccaactcataccctatgctatggctgcatacaggggagaaggagaatagggtccaatatatgtggctgcatgtaagctccagacttttgtagctgtaaaaatgatataattttgaaccatttatgaaatcctggccagttaaaaattcaatcataattgatcatcacattatttagttttattgttcagaagaagaaataaagctcccccccccccattttatatttagtggctttcagtgtcaatatatccagtcaggatttctgattcaaatcataatttttacccactaagtgtatttacctacattttataaaatagaaaagataatttaaaaattggcaataataactgctttaagcctagactatctaataataaaatccaaggatgtcttctacctcttttaattcagcactgtggttcttttttttttttttttttttttttgagacatgcaccaccacacccagctgattttgtatttttagtagagacggggtttctctgtgttggtcaggctggtcttgaactcctgacttcaggtgacccacccacctcggcctcccaaagtgctgggaatacaggcatgagctaccacgcccagtccagcactgtggttcttagagtgtggtacctggaccaagagcatcagtatcacctggaaattttccagaaatgcaaactcttgggccccacatccaacctattgaatcagaaacttttggatccctgcaatctgtgttttcacaagccttccccgtgatgctgatgcatgcttaagatttgagaaccacttctctagtatatatcaggtttttactaactcttttttacttaaagatttttacattctccctcagaaacgtctttcaaatttgacttctctacatacctcccattgctgttacacaaattaaaagcttcctaattaacctcaccttccaccattttagacatgcattcatccatccatccatccatccatccattcatttattcaataaaaatatatagagtacctactgtatgctggacactgtgttagatactggatatacatcgaagaacagatctaacaagattctgaaacacatgtaatcacatcctatttgggggatcccgggttattttatatattaataggaactataagggaaataaaatgaaataatagtgattagggagatgttagttggggtggccaggaaagggtttctgcagaggagaatttctagctgagagctaaaaggtgaaagggatccagcctttcaaacagttggaaaaggcagaggaaataataataataagtaacctgaggacgggcatggtggctcacgcctgtaatcccaacactttgggaggctgagatgggcggatcacctgaggtcaggagttggagactagcctggccaacatggtgaaaccctgtctctaaataataataataataataataataataataataataggtaacctgagattttgccacatgccaattatagtggtaagcgctttacacgtattaacacttttaatcctgacagcaaccttgtgggcacgtactttctgtatttccattttatatgtaagcaaactgaggcatagagaggttggataatttacaaaggtcacatagcctctaggattcagtgtgagatgggactagagggatagatacggctttatttgccaaagtgagaatgttggatttaattctaaatggtattgaagccattcgtgggtcctgagacggtactgacttggtcttatttacaaaggggttgtagaggagccaggtgggagtaggaagcatgatgaaggctgtcaccctggaccaggtgagaaatattcacggcttggacaagagtggtagcaatggagatggaatgatgtggatggaagtaggatttagtttgcaaataaaacaaattttgctgattgtttaagggagttaaagggaaaggaaggacaaaggaaaactgtttctctacacacaacacttctgacaccaaatgtgtgggttttccacaccaaacaattctccagttctcttcagatatcaactgggtgtcctagaacttaattcaattctgacactaactgcatgacattatcacagacccacaggttaggggctcagtcccgcaagactctccccaacttcagatgcccattgaaattagtacagccccaggttattcacacttctgtccaacttgtctacaaatcgggagttttccacaaccacctctctagattcgataatttgttgtaagggctcacagaactcagggaaacactatgcttactatttctggttcattacaaaggatattagaaactatacacatgaatagccagatgaggaagcacatagggcaaggtttggaagagtcccaagcataggagcttctttctctgaagttgggtgtgttaccctccggcacatgcatgtgttcaccaacccagaagctctttgaacccctttattgagggattttatggaagttacagtacaaaggcatgattgattaattcattctccattggtgactagctgaatccccagcccacctcccttccccagaggctggggaatggggctggcagttccaatcctctcatctcatggttggttcctttgacaactagcccctaatttccaagagtcacttcattagcatagtcaggtgtaatcgaaaggggcttatttgctgggcagggtggctcacacctgtaataccaacacttttgaaggctgaggtcggcagatcactagaggtcaggatttcaagaccagcctggccaacatggcaacaccccatctctactaaaaatacaaaaaaatagctgggtgtagtggcacttgctggtaatcccagcaactcaggaggctgaatcgcttgaacctgggagtcagaggttgtagtgagccaagatcgctccactgcactccaacttgggtaacagagcgagtctcattgtcaaaaaaaagaaaagaaaaaagaaaagaaaagaaaagaaaggggcttattatgtatgaataccaaaagatgctcctctctcccctatcattcaagaaattgcaaaggttttaggagatctgtgttaggaaccacagaccaaatatatatttattatatcacaatatcaaacagaattatcatggatgatttttaggtttgaacttgagcagctgggcaaacattgttaccattttctgcgatggcaagaccaagggaagaaaggctttatttcagtggggcaagtgaagagttctgtgtaggccagtgttgctttgagatgccttttagacctgcaaacaaagccaatgagaagccagctggataacaataatctggagctcacaaaagggatgaaggcaaaaaatgttattgtgggtgtcactagcccactgatggtattttatagaaaagggtttgtttgagtcccccaggaggataatgtagagaagagaagagggcccagaactgacacctggcagtcttgggatacattcagaagttggatagcgggaaagatacctcctgtcatctctggattcatctggtatgagcagactggaacctcagtggaacacccttggaagagagggtggatccattaccaaaccgccaagaaccagtgcgacagcttgttctgatctgcatctacagttgattgacctagtcacttgctacaccagactctatttcacactgaattcctgttatctgaacatgctctttatttttgtgtatctgattttttcttcagatttttttcttctgaaaagcctctctgacacctccctcccccgtctggtcactgtcaccgctgtgctcctatagcgagttgcacactttaatgtgatagcgcttattgcattaaccacttttagttctctgtcttctctatcagactattcagagccagagacatgacctacatcttcatactcagcacttgcaaactacctgtagggtctcagtctctgcagatatctactgaacaaataatggaaggaattcctcagacctggcccccaattcgtgttgcatatgcaaccccacacgccaatctctaaattttctcccaataaaggtttcaggaaaaagaataactttattagctatggagtaaaagtagataggaaggtgtggtttctaaagagtcattattaaattcgcattaatagtaacggtaataataaataaaaagtaaatcagcaccaccttgtactgaacacttagtacataccgggcactgctctaagtttgtgtgtcattcataaactaattcaaaaattagaacctcaggatttctcattttaacattgtctagacaaagcacttattctttctttaatttttcatcttatagtctttttgatggtaaagatctccaaaacttaaatttcttatatttccttagcactttattctccagtgaatgccaaacatttgtctatttgatttagcaatgatatctgttacatatgcaaaatctcagccacttttcaaataaagaattctgaccatggcttttctaaattatttttccgaattagtttagaaaatgttgggatagtttggggaaaatgtaaactaagtaaaatgtatggtacccctgtctttccatggtgtatcaagacagttttcagttggtgatcatgttttagttcttaataactactcatagattatgccatgtgcacgaaagtttatgccatgtgctagtaatcttcagacattaaaaatagggttggtttgctttttcggaggattgccttggaaataatctgtatcctaatttatatagctagttatcttttatgtagctaatgatttgcttgtatggatattggtagaagacagattccatgttacaaaaagtttgagaatatcagtgtaaataactgttttattgcaggatttctcaaagcctgtaatacactaatgtgtccagtgaatcaccaataacatgtagcatttttcgtatttggttgcccatgaacctttttcctccttcatacgtttgacatcttgcaaatatttcatagaacacaatttggaaaaactgtggcatttaggttgtgaagatgcagaaggcatacttattgttttccaatctttgttacggaaaaggaaaaccaacagttttgttgggcaatgcctgcagagattacaacaaaaatcccataaaagtgcttatctccttttaatattagattgctcagatctgagcaaataagccgaaggtcttaatttaatacagaatagtgctgtatatcactgtttcattgttgaggtgttaacactccctcagcctaagacaggaagtttccaatttctctagcctccggatgttccagaatggcatttaggatcgtctgtagtatggccttagtggatctctcactgttccatcacatatgtctcaccttctgggcaaactggacccattgccattttctaaatgtactcatgttgtctgcagtcttacttttgttcttcctctttgcctaaaatatccacccattcacctccctatgttgaagttggaccatttgctaatttaatatatatatactggggttgactctatgcaagaaactaatcatatttgtagttttagagaaatatattcataaaatattttctttttcatctagttggatgtgaaccctatctgctttaaactaccttagctgtgaaccctatctgcttttaactaccttagaatattttacatcttagaaaatagtttctttgcctacatgttgtactagtcaactgtgtgcttgtctcttacctcctagtagactaagtgtattgcaagcaagagctgcgccttagttattgtaatactggtacagcctgtctcagctcctggtccctacgtggtacttaagaatctgtcagattgaatggagttcataggttcctagactccactaaccaaaggtgtttgcttctgactccttaggaattctatctatactgacagaaaaggtttcccaggcagcacccaataaaccttttcctgcaaaatgggcttgcttttgaacacgcctcatccagagtcaaagagagacatggctggagaccctagttctactcttacccactcattcccaagatggtctgaaagcaaatgtgaaaaagagaaatgcgttgacttaattaaactgacaatattgttgttgacttttcttaagcaaatactgtcaaaaacaaattgaaagcgcagttgtttcaagtaattttcaaaatgcaaacattttacttgaaatattgttaactaaactgtctaatttgactgaaagttcctgccattactttagatggtacaaaggttgatggttgatgcccttcgtccaccccaccccctcctttttcaggtgctttcagtctaaagatcaaataaagtatgcacatcacgttaagaaagtttgatgcacctgtgtttagagggcatcttcattcttccagctcagatacttgtgccccattgccccttttccagttgtttttttgaaatgaatgatttagggggaaaaaaaaaagcaattcaaaagggtaaaggcagaagaaaaaggccggatggcttctcgtatctttttctttgtgcttttgatgtcagtcttttattgctttttacataagtggaatgagaatttagacaagaaaaagatgagtaaaacctttctgacaaggactgtcttagctatttgatagctataagactgtgggaacctaagttggataccaatccatcacattacagtaatcaacattggcttagttttttgtgtcatacattttaccttgtcaagagaaaagtgataaagaaaaagaggcaattaatgactaaacctgtaataggtaatagtaataggaacactttacttgctgtcagaggcaacatctaacctctgctgatgagcttacgtgaaatcactttctgacctctgtagtctatttatttctcattaaaaatttttttacaggcaaagataagattaaagtgtctgaggatgacctggagaaactccttctaattaaatggtgtgttttggaaaccattcgtttaaaagctcctggtgtcattactagaaaagtggtgaagcctgtggaaattttggtaagctttggtttggttttaaatgaatcaaccttctacaaaaaaagtacacattttgcccacatatatttttcaggttgacatatcttgatttatttttacttgacaaataaatattttatatatttgtcttgtacaacatgtggttttgaaatatgtatacattatggaatggctaaatcaaactaattaaaatatgcatcacttcacttgcttatcagttttctgtgtaagaagactaaaaatctattctcttggtaattttcaggaaaacaatatgtcattactaggaatagtcaccatgttatacaatagacctcttgaacttactcctcctgtctaactgaagttttgtatcctttgactaatatctctccaggtcctcctccaccccttctttacccttcaatccccggtaactaccattctactctatttctgagctcactttttttagattcaacatataagtgaaaatacacttatatgtggtttgtcattcttcctggcttgtttcacttaacaaaatgttttctagtttcattcatgttgtcacaaatgagagcatttccttctttttaaaggttaaatagtattccattatgtatatatacattttataaacatgggagtgcagatatgtcttcaacatactgatttcatttcctttagatatgtacccagtagtgggattgctagatcatatagtagttctatttttaattttttgaggaaccttcatactgtttaccatatggctatactaatttacattcccaccgatagtgtgcaagtgttcccttttctctacatcctcttccacaattatctttcatctttatgatatagccattctacaggagcaaggtgatagatccttgtgtttttaatttatattttcttgatgattagtaatgttgagcatttttttatacctgttggccatttgtatgccttcttttgagaaatgtctattcagattccttgccaatttttaaaaatcattttttttgtttttgttttttactagtgagttgtttaagtttcttgtatattttggatattaacctcttgtcagatgtatggcctgcaaaaattttcccccattaggttgtctcttcattctgttgactgtttctttggctatacataagctttttagtttaatgtaatcccatttttctatttttgctttggttacctgtgcttttggattcatattctcaaaaaattgttgcccagatcactgtcatggggtcttttcccatatgttttcttctggtagtttacagtttcaggtcttactttcaagtctttaatctattacagttgatttttgtatatggagtgaaatacaggtctaatttcattcttataaatgtggatgtccagttttcccaacatcatttattgaagaaactgtccattttctattgtatgttcttggaacctttgttgacattcaattgactgtaaatgtgtgtatttattctggggctgtctattctgttctattgatctatgtgcctggttttatgccagtaccatgctgttttgattactgtagctttataatatattttgaagtcaaatagtgtgatgattcaggttttttctttgttcaagggtcttttgtagtttcatatgttttttctatttctgtaaaaatgtcattagaattttgatagcatatattatgtaatttcttgaattccattgagcacaaaatgaccctagaacaggttattaataagagttgtgtagcaatgtttcattaatatagatatttatcttatggcaagtactttaagtaaaacataataaccctttaataatcattctggccatctgattctgaatcagaatcaatataatcctatttaaatcaggcaggtgaattgaatggtctcttgtctactgattcaaccaacatgaatttcttagcaccaatgagctaaggaattcaggatgtgaagaaagttattttgcatagctggaagacaattttaggccacagattacagatatgggaacagataacaggaatatattggataatctcaatttatattaggaggcagcagctgagtgaaggtgagaggattttctatggacaaagtaggaggaaattctcaagtgcaccatgaaagggtatgtgcacatggcagacttattagttaaatatttgtgaatcaatatggcataacaaattattttttttgaaatgatttgacttagggcctgcattatccaaatggatcacatttaatcagtcctctactattgtttgcttttttatatgcagcttgagagtgcttggattcaaaccaaggaaattttgtaatagaacacagataaaaatccaaattttgtaaaagttgaaacttttgcttccaaaggagacatgatttatttaactgaccttatgtaaattagagtatttagtttttgtgggatttcaacagttcatacttttatttatttttattttattttaatttttttgagacagggtctctgtcaccaaggctggagtgcagtgacacaatctcagctcactacaacctacaagtagctcttccacggtcttttaacctcatgtattagtcaggattatgttataaagggagttgtaacttttgttggggctattaacctcccatattctttcaaaagtaattttacttattttgacaactttgccagaagagatacccatgctcaaacacatgcacacagatgtatactcttgcatgcacaataccccatctgcacaacctcttaaatgtactaccgcaactatctaatattctctttgtatgacattaatatagaaaccaaagtttcagcatagtgtaaatctgtcattaaaatttttttaacactaattcttcactttttatgcatctagagagttttcacatttatttcagtggtcacataatagtccattttcttgaaagcataaatatttagtagtttttgactcttcagaatttagattgttttactttgtggttatgttaatgtggtaattatttgcatctctgttgcccatgctggagtgcagtgacatgatcttggctcactgcaaccaccacctcccaggttcaagcaattctcctgcctcagcctcccaagtagctgagattacaggagtgtgccatcatgcccagttgatttttgtatttttagtaaagccaggatttcaccatgttggccagactggtctggaactcctgacctcaggtgatctgcccgccttggcctcccaaagtgctgggattacaggcataaacgaccacgcccagctgaaaagttttctgttttaataaaacacatctacacaattttgaattggtagcaaagtcatctaatatatggatatagtatacatttttaaactagtccctgttcttgcatatgtatgtggcttccaatttttcacttctataaacagtgtgaagatgaacatccttttagctaaatccttgtatacattactaattatttccttagtataaattcatacaatttggttctttcaagattcatatgttttcaaaaacaggtggaatgtttttgctgaactgaagtttaacgatatgttcccagaaatttgtattttaaaacacatttcacatgggcttatctatgttgagtaatgacagaggctcatattttctcctctgttgggcaactggtcaatgttcctttttatgcatactagaagtattctcccaccacccttccctaaggtagttcgaacaggctctctttgtttgcttttgcctctgtgccctttcctggaaatggaatgaattgaaatggacgaacactctctactttcttggatttactgcattctttctttctctttattatgctacctttctaaaactctgaaacttctacctgtgttctcttttcaaggttttatatgtttagtagaaaagtttatcttcaagaatatccagaaaagagtaacaaaaaagagtattggaaaagatgagtaattgagaaatattaattatcctttaaaacctgttataaagccaaaagaattaaaatgttatgatcccggtgtcagaccagatgttcagatcaatagaaataactggaaagataacaaagaattagcttccttatacataataatttaatgtaggataagtgactcttttaataaatcaatgtaaagggaagaaattaatatgtggcttgggatgactgactaaaagtgggttttttttaaacttcttaagtagaagttctcaaactttttggtttcatgatcccatcacactcttcagaattattgaagatcccaaagagtttttgtctatgtctattttaaatctatcaatattagctatattttaaatttaaactgagaaattgttaaaatattaatttggtgattcatttaaaataacaaaaacctcttacatgctaacatgatacatagttttctaaaacattaactatatttattttataaaaagaagaggactgcctgattttaagattaatcaatgaagccacaaaaaggataaacagatttgaatgtaccatagcaaaatttaatgtctcattttttaaaagtgtaactcaaatgtgaatataatgtaaacatcaatatacaacacaactataaataattttaatatttaaagaactgacacaaatcaataagaatgagtgtcacataggttaatcaggacagaacataaaagtttataggataaaataaatggaaaaactctcaaacataaaaatgtaaatgtaaaaacataaaaatgtaaacctaaaacaaccattagaaatgttagattacagataaaagggtaatgaaacttacattctcataaattatagttagaaatatattttgctacaaaatttgaggaaacagttgaataacatgcatttatagccttaaaatatgcatgtcctgtgtcatctgaacatctgtgttaacagaatctatgtggaaaaatgctgtgtggaagaaagtgcttatggtggcactatttaccacaggaaaaaaagtagggaatgattacattaattattgtttaatgtacccaatggaagattaaacagtcattggaggaagaaatattcaccatgaatatacaataaaaagggaaaacaggttatgaagttaagagaactaagaaagattaaattggttattcaggaggatcaaaactatgtttaaagtttaacaacaacaaaatatctcctattaatactaagtaaacatactggaaagaaatctagctagttaatgactgtctttgggtgtcagaactctggattttcttttctagtttttctgcttttcagaattttccaaactttttgtagagataagtttttatcatacaaaagaatatactctttaatttaaaaaatacttattttgtttttattttttttcggcacaaacaccaaccaagcctctggttgaaagctaggagaaaaggctgtgtgctttagacctcctgctatagatgtgttgcctctggactcctcctttctctttaagattatgtattcctggcacccacttagctctgagcacctttcttgaattacaacacagagtcctgccttctcttccttttttaaagaaagccccacttctagattatcagatgaagcttgttttggcttcacaccatccaggtgaggtgggctggccaggctcaattctgtctacctgagagatgcagttcttgcaacacacagaagttgtagcttccctttgctagtgatctgtgttctcattctgcaactgttttgcctccctcttgatctttcacttcatctgtcatgtaagtaaagatagggactgtttaggctgggcgtgatgatgtctgcttgctcagagggtttcttgacagaaccagctccagcattcattccttcatgctatttatcagtctggcagttgctgctgctgcaacaggcacctctttcttgtctcctccctgttgctagtggtaattctgttactgaggacctgtatgaagttctcctccctttgctaacctgctttataggctacaacagtcagcagcctccaagtcatgatcacaggtcaacagcaacttaagaggactttgcggtgggaaggggaagggctgtggttgtcctgactgaaggcccatccctgtgctgcccccaaccctgctctcaaatacacatcacggccctctgtggctgattccagagtcagtaatgacctctctagcctcagttccaatggaagtaaaacagacaggattgggatctcacaggtctctctattttaaaatgatagaaggtacctgcaaaagcttcactgtcttcccagtcttggatttgagtctctccagctctcccagttctgaaattgccaaatctcaagcaatactcagctgccactagagccaacaggggttctcctgggttaaaaaaatgatgacatccctacccatactccactcatagctaccagtaaaagacatatttttatttttcttcgagacagaatgtcactctgtctcccaggctagagtacagtggcacaatcatagctcactgtaccctcaacctcctgggctcaagcaatcctcctgtctcaaccacccaagtagctgagactacaggtgcaccatcatccccagctaatatttttcatttttttgtagagacaaggtcttcctatgttgcctaggctggtctcaaactcctgagctcaaaggatcctccgaccaaggcctcccaaagtgctaggattacaggcatgagccaccacacccagcagaagacatgtttttaattgtaaggtgtttatgctttggataagtaaacctaaagtaaaagtttttcaaatatcttgaggacatttcaaaattatacacggttaaatagatgtggcttatgatgatgggcagtgggaattacctaataaaatatctctaccttagtaaagttggtagctatctagcaattataaaacttgggagatctctttgtcctgtgattcctgaacatggtgatgatagggagattttgtgaaatgggttttagttctttgtatagtttatagatcatgaaaatctgttgtcatatgaatcaggaaggataatgtagactacctgaggaaacacattgtttatcctcatttccacaagcactgtgaccccaaacacaaacccaaccaaacaaatacacaacacttgccttttcctgtgtcttcctaaccagtcgtttttcatttgtttctttcctaataaccggtgctggactgaggaaagaaaagtccactgcccctgctctaacactgtcattagtatccacaagaacaggacatcctctgcccctcttctcagtgctaccatggccattgtccctgtctcagagtccaatttttctgtttcataacctgagcctccactgtagtttctgccttcaagaactctggccacaaaccctaatatcaaacatcaaaaggtacattagaagggacttatactagtttctaaaattttgacatttagctaatatttccttccatataactgaatatatgtacatgtgaatcagaattatataatttcctctatgtaaccaaatatatgtatatggaaatcagaattatatagatactatattattagattttatattatttataattagatattatataattatatagatattaaaaattagattttctcacattcaattataaaaggtatatcttcaccacaatataattgtagcatcatttttagtggcccaaattctctttaaagtatatttcaaaaaaatgatttgcagctgatttttctgttatagaattacatcattccttctggtgacttgttgatgttgtctccattttggctgcatagaaatccaaagtattttcctgagcctgaattgttcaaacctgtaagttatctctttcagtatatattattctttcattttaatttctttttatttcagaagggtaaattcagaaattaattaggactatataattaagcagccatatttctctcgtaactaagaacaaagttgactacaaagtacagaacagatttgcaatatagatagtgcaacatttacaaatcagttagaaaagtttttgtagtaaacttctctaactttaaaatacattttacatgaaaccagaagggcatgttcaagtgaataagcctgtttttgatagaagacttatttcatgttcttcaggcaattgcttctgtcattggtttccaaggagtacaaaaaaatacaaataaagcaaattaaaaccgtgatctgctgtttcttagaactggaaagttacagggccgaacagaatgttaagaggtcatttagtctgttctctgcctttaggtaaaactgtcaaaaatggcatccagatgcattcattctgcatcccaagctttttctaacaggcagggatgtcagtgtcttactactaaatttattaccaagagcaattttatgacggagcctgagaccttattataaatattcttcctcttcttaggtcaattctgtggttgatttaccttatcatttacatttaccacttaacagaattttttaaaaacctttttatttataagttcatgttccagaaacacaattgtgtctaatattaataacagggtggaaaaaattaccaacaaccctgcaactttatatgcaaggattagctgtacaaggtcatttttagcctagagaaataaagttaagcttatttatataaggctgatttggaaaaaaaaatgttttcttcccacaggaacgttggaaaaaggcaaatttagagaagcactctttcttggactgcttcatggcatttggaagcgggaagttccagtgtcctgcaaggtcagtgagacagctgggccacatttatccagaaagtctgcagaaagatgatggctcagaggggaacaactttggcttaatctctttatatatatatttaaactatagggaaatccagaagaacacattttgtctggtttatctgtggtcctgtgcagtgtctctctgggaatatctaaagtggcttctgatagaagaccttatgagaagagaacattacacttgccagatgccacatcaaagcagcgtttatggttcaaattgtcagctttcacacaaacataattggaagtggtttgagtgctaccttctttaaaaacaaagatagaattatatttctttcactatgacattgtcatggatatttgctagggttctagaaaatctttggcttggagcatagcaggcacttactaggtggtttttgtctatggtgttagtttggcttgtgaaaactttcttttgataccttttatagttaaattaatctggcacccagccctcctcctcagtgtgataccctgttctaatgcaagtgtccattgtttaatgaaagttattgttatctttatttgttcaagcagaaaaggtttttgaacatctcatctgtgccaggccctcttctaagcttcagagagcactgaggaagaccaacatggtccctgacttcatagaatttacaatctacattaaatatgtcacatttcttcattggggatgattctgtaggggaaatgtcagtacctgtttatgacaaaatctcactcaataaatgtagaaatccattaaatttttatatttaaaaaattgtagtttcttgaagtcagtcctcttcattatttgaacaataatgccagtccatatttgcagttattaattgctccgcagtatccattccatccttccgttcttcatgtgtttagagtattagtatgattttggtaatttacgcttcccctaaaatagtattaatcagtcatagccaatcatggaaattctatcctcattttaggcattattctagaaatctaagcctaagcaaatgggtgcctggtgttttgatgagctgcttgtcctgaggtaggaagttgagctaaactggccaaacagagtgaaaggagagacttcttcaggatgaggccccgttcatcctgtcccattggatatgaacaaggaagcatgcagcctcagatgttactagcagcaagttcaagaggaataagctgtatgatggtgcagtctgtagatggcagagcagaaatatagtaggagcctgaatccctggaatctcagtaatattattttgtcgctgaattcatcagatttgaggagcttgtctacttcctgttatgttagataataagtgtccttactttttaagtcacttttagttgagggttccattgtttggagctgaatacccaccatatactgacatacccaccataaaactccaaagctgaacattataattgagtatcagttactttagggacatcatataacacacaacaacattagcaacaaaaacccatcatgctcatcctgcctctcatattattttcactttagagaagcagttcttaagccaataacaaattttttgtttttgtcacataccaaatgtcaatgtcctaagaatagttcttctaaaaacaatagatgctacttttttcaggtttctttatatcactatatctagctatctgtctgtctatctatctatctatctatctatctatctatctataccaatagcaactaaataatttattgtaatcatccttgacctggagctagcagtattttaaaccaatgactgaaatgtcttgcaatgaagtgtgtagtatgggccaatggtcaaggattacctgttgactattgtttccaagaggcgctattactaccttccatgatgacatttgaggctaacagacatttttttgagtttgaaagtaattggtataataaagggaaccatgatgctgtaactcaatcaatagtatcttctttagacagaaactacgtatttttagagcacgctgagctcttactctgtgcaaggcagtgctctggctaccataggggctttgagcatgagtaagacatgtttcaacccacatgagaaacaacttagtaggggcaaagtggacattcaattaataaataactgcaaggatttctggtcgagagatgccaaagcgtcacactgagcttcaagagaaaggatatgtctggtcaagatgctctcagaagatttcctggggaaagtggcgggagaccttttagcttgagacaacagaatgagcaaagggttactaagcacagaggcatgtggcttaaggccttatggttttactgttactgggaccagattacagtggtgagaagtaaggctgaaaatgtacactggcccaattgaaaaggccccttaatacctgatgtatgagtttgtatgcagctcacatggcactaataaagaactaaaaggttttgggcagagtggattcatgtgaagcatgacttaggttatatggttatgctaatattctatgtgtgagacatggagtggtagaatctaccagatttggaagatgattagaagcgggggtcaggtgagaggaaggctttgaggtggactgtggctttaaatccaggtgtctggtagaggtggtggaaatacagaaatcaggaatgagagagagtctgggagcaagatctgaagttttcctttgaaagtagagtgtgtcaaaatatatatatcacttaaccaaaatctaccagttaaatataaatgttgaatacatgtgacctatttaagaaacctcatcaagtttagttttctactgtttctgttttaaaatgtccttaattttgtcttattacttattacttattttaaacagccaatgcatgaaatgttttgtttctaaagagaaataaaatagcaaattgttcaggaaagcaaatgacttcatttggacaatgtataccaaggtagattttttttgcactagaaatttaatcccacaaatccttagttgtaatccccagaaaattgcactcgttcttgatttgtgttccaggcgccaatttattttctcatgcaccaaatactcagtgagtcagagaaagttgcctgtaatatggctgatgatcaaagttcatcatgaacacacactcttatggccttgcagctgtcacttcttggagttcaagccactgaggtggtatgagaacccctctcacaagcaaacacagaaggttctgctgatttaagtcagtatgtactcggtgctgccatgggataacaaccaaaaatcagaatggaagaactgtggttcctcttcgtattcgtgggggttctgaaagtaggtttggagcaggatcccactgcgaggcacttccttgtagcacatggaagaaaatctttctagtaattctactactggagaagtctggtgatttatttctgttttgttttgtttcagaaaaacaaacaggaaagagcagcatgaaccaccagacttcttcagaaattgtagcttgcaaagtgaagagtctcattatagcagacagtctcacattaaactatacgatttaaatggaggaataagacggagggttttcagtgtggaggaaaacttctttgagtgagcacctctgagagttgatgatcttagggatgtgcttgctatacctgtcccctggaacacacaccaaaaccaacaagcttgattttccttggttctaattcctgcaagaggatgcctgatttgctgtgtcattgtgcaaattgatatggcttaaactccagtgtaaaacaacagccctgatctttggcaagattaatctgcttataaaggcatgcttggataagaagagagtgtaataagaggaaggctgcaatacttgagaagttaaaatgaagcatggattcctcaggaatagaaagtgtgatttttactttttgtgtatgtttgggtctttcatgtattctagggagtcctaggccacaaagtcatgggcttgtcttgagttcctaatgaaaatctcacatctattggaaaattaattaaaatcagaggtccatctaatagtaatttagtagtactgtttttaaccaaacatctcttgagcatctagtattaatacaattattcttttatttgataactatttactgagtgtgtgctatgtgtcaggttagggttctgggagttatcatggaaaacaaatcagatgaagcccctttcctttaggatgttatattcccacccaagtcaccttgttaaaaactgggaagagtcaaagactcataacatttctgaattggttataatgtggttggggaaatgagacatagccatatgaaaaaaaaaagccctacttaacagcttaagatggcacatgacaaatgccagaagactcagatatgtaacaactgccataagaatttggaggaagggggattagaaaaggcttttggactagattagaataatcagtaaacaacataaaagaaaggtcagcttcctaagatgcagcagtatcaaacttcaagggaagaaaaaaaattaagtgcttataggaatataatatacctatatgttagtgatagcaaggcgatgatatatttgggacttatgatgctctgagcacatctttttctatatatttatgttaaagataatgccattttaaaagctgtgccttatatagtaaagtatctgcacactcttgtatttgagaagtgttattagtagctttctcccttttatacttagaaatagctgattgcttttaaggagtgagcaaatttaaatccccatagatttagtgacaagttaaaaatccaatttattctgaggaatttgttccataaacaaatgcatcccctcaactctagttgttaaatataattaaaggaattgtatttacttgtataattgtttcctaacattttcacaagagtgtgcacatatcctggagagtatataaaagagggttaggaatgagggtgggaaaggtgaatgtggctaattctgagactctgagccaggttatcagaatccttattgatttttagccatgcttctctcttctcactgctttgcaaaggagcaatgagtcactcaaaggagcatagaaaccattggcaaaattgcagtcattattttcctggccatttcattttgatacttcattatgaagctaagacataagtatgtcaagaacagaagaacagaaacagcaattcaagagtggtctttttttctttttcaacttttattttgggttcaaggggggtacatgtgcaagtttgttgcatgggtagattgagtgtctcaggagtttgatatacaaatgatttgtcaaccaggtagtaagcacagtgcctcacccccctcccatgctccacccacaacaattccctctttgtgtccatgtgtatttaatgtttagctcccacttgtaagtgagaacatgctgtatttggttttctgttcctgtattaattcatttaggataatgatcttcagctgtatccatgttgctgcaaaggacaggatttcattctttttatagctgcacaggatttcatggtgttactatgtaccatactttctttttcttttctctgtctctctctttttttttttttttctgagacaggccctgttgcccaggctaaagtgcactggcgtgatcatagctcactgtagcttcaacctcctgtgctcaagcatcctcctgcctcagcctcctgagtcactgggcctacaggcacatgccatagtgcccagctaattttaaaaaaaattttagtagagacaaggtctcactatgtttcataggctagtcttgaactcctgagctcaagcaattctcccaccttggcctcctaaagtgctgagattacaggcatgagccactgcacctggccccacattattttaaatccagtccactgttagtgggcatctaggttgatttcatgtctttgctattgtgaatagtgttgcaatgaacctatgaatgaatgtgtatttttggtataatcatttatattcctttgggtataatgggattgctgggttgaatggtagttctaagttctttgagaaatctccgaactgctttttatagtgaccgaactattttacattctcatcagcaatgtataagcattcccttttctcctcaacctcaccaacgtctgttattttttgactttttaatgataaccgttctgaatgatgtgagacgttatctcattgtggttttcatttgcatttctctaacgattggtaatgttgaacagttttttatatacttgtttcccatgtgtatttctttttttgagaaatgtctgttcatattatttgcccattttttttaaatggggttgtgttttgcttgctgatttaagttccttacagattctggatattagacctttgtgagatgcatatgccaaatattttctcccattctgtagattgtctgtttactccgttgacagtttctcttactgtgcagaagcttttcagtttaattaggtcccacctgtctatttttgtttttattgcaatggcttttggagactttatcatgaaatccttggcaaggcctatgtccagaatggtagttccttgattttcttttacagccattaaagttttaggtcttacatttaagtcttcaattcatcttgagttgatttttgtatacagtgaaaggaaggggtccagtttcagtcttctgcatatggctagctagtttatcccagcaccatttattgaacagggtatcttttccccattgcttgtttttattgcttacttatccgatctgatgtttttaagtgtgcagctttattcctggattctctaatttgttccattggtccatatgtctgtttttgtaccagtatcatgctgtttgggttactgtggccttgtagtatagttttaagtcaggtaatgtgatgtgtctagctttgtccttttgcttaggattattttggtaatttgggctcttttttggttccatatggattttagaatagttttttccaattctgtggaaaatgactttggtagtttgataggaatagcattgaatatttaaattccttgtgcagtatgaccgttttaacaatattgattcttcctatctatgagcatggaacactttctccatttgtttgtgtcatatctgatttctttccttggtgttttttaattcttattttaaatatattttacctccctggttagctgtgttcctaggtattttatgtgggtggctgttgtgaatgggagtgcattcttgatttggctctcagcttgggtgttgttggtgtatagaaataccactgatttttacacattgattttgtattctgaaactttactgaagttatttatcagttttaggagatttgggacagacagtagggttttctaggtatagaatcatatcgtttgtgaagagagatagtttgatttattctcttcctatttggatgccttttatttctttctcttgcctgattactctggcttggacttctagtactaggttgaattggagtatgagagttgggcattcttgtcttctttcggttttcaaggggaagggttccgatttttgcccattcagcatgatgtcagttatgagtttattgtagatggctctcattattttgaggtatgttcctcctatgcctagtttgttgagggtttttaacatgaaggaatgtggaattttatcgaaggccttttctgcatctattgagatgatcatgtattttttgtttttagtttagtttatgagatgaatcacattgattgatttgtttatattgaaccaatcttgtatccaaggtaaataaagtaaacaaagtaagttttatttactctaaagtagactttattcctgggatacaaagtatggtggattagctttttggtatatggctgaaatcaatttgctagtattttgttgagaattgttgcatgtatgttattcagcaatattggcttgaagttttcttttttcattgtctctgccagattttggtatcagagtgatgctgtcctcatagaatgagttagggaggagtccttcctccttgacttttttgaataatttcagtaccaataatttcaagattggtaccagctcttctttatgtatctggtagaattcagctgtgcatccttctattccagggcttttttggttgttagattataatataataacgagttttgattccatttcagaactcattattggtctgttcaggatttcagtttcttcctggtaaaatcttcgaaagctgcatgtttccaggaacttattcatttattctaggtttccaagtttgtgtgcatagatgtgttcataatactctctgagggttttttaaattatttctgtgggattggttgtaatatcccctttgtcatttctgattgtgtttatttggatcttttctctttttttttctttattaatctatctagctggtggtctatgaatcttagttattctttcaaaaaacaaagttttggttttcttaatcttttgtatggatttttgcgtctcgatttttgcatctcagttttggtcaactccagttttggtcatttattttcttctgttagctttggggttggtttgtgcttggttttctagttcccataggtgatattagattgttaatttgagatctttctaacttcttgttgtaggcatttggtgctgtaaactttcctcttaccactgatttagctgtgtctcagagattctggtatattgtatatttgttttcattcatttccaagtatttgtttttatttctgccttaatttcattctttaaagtcattcaggagcagagcaattaatttctatctaattttatggttttgagagatgttcttggtattaatttctatttttattgcactgtggtctgagagtgtggttggtatggttttggttttttgaatttgttgagtattgcttttatgacccagcatgtggtcaatcttagagtatgtgccatgtgcatatgaggataatgtatattctgttgttgggtagagtattctgtagatgtctgtttggtccatttggtcaagtgttgaatttaggttctgaatatatttgttagattttctgctttgatgacttgtctgacactgtcagtgtgttgttaaagtctcccactattattgtgtggtatgtaagtatcaatataagcctctaagaatttttttttatgaatctgggtgcttcagcattagattcatgcatatttaggaaagttaactcttcttgttgaatttaaccctttatcattaggtaacacccttctttgtcctttttgagcattgttggtttaaagtctcttctgtttgaagtaagaataacaacccctactctttttttattttctgtttgcttgatagatctttctctatccccttaccttgagtctttgggtgtcattgcatgtgaaatgggcctcttgaagacagaatacagttgggtcttgtttctttatccagcttgccactctgtgccttttaaatgaggttcttagcctgtttatattcaaggttaatatcagtatgtgaagatttgatcttgtcaccgtgttgttcactggttcttaagtagacttgattgtgtagttgctttatagtgtcagtgggctatgtacttaagtgtgtttttgtggcggcagataatgatctttgatttctgtttggtagtcccttaaggacctcttgtaaggcaggtctagtggtaatgaattctgttcacattttcttgtctgaaaaggattttatttctcctttgcttatgaatcttagttttgttggctatgaagtccttggttagaatttctctgctttaaggatgctaaatatacacccccaatctctcatggcatgtaaggtttctgctgaaagtttcattgttagcctgatggcaattcctttatacatgatctgccccttctccattgctggctctaagattttttcttttgcattgactttggagaatcttatgagcatgtcaacctctctagtgaagttgaggaaatctttgtggacaatatcctgaaatatgttttccaagttgcttgttctctctccatctttttcaggaatgccaataagttgtaggtttggtttcttaacataatcccatatttctaaaagactttgttcatttttataaattattttttctttattgttgtctgcctgcgttgatttgaaggagctgtcttcaagccctgagattctttcctcaacttggtttactctgttatcagtgcttccagttgcattctgaaattcctgtggcgaatttctcatttccagaaattcagtttggttctttgttaaaatggctatcacatctttcaactcttggaccatttcactgttttccttggattgggtttcaaccttctcctatatcttgatgagcttccttgccatccagattctgaattctatatctgtcatttcagatatttcaggctggttgagaactatagctggggagctaatgtggtagtttggaggttaaaaaatgctctggctttcagagttgccagaattcttgcactggttccttctcatctgtgtgagctgatgttcttttaatcttttggatgggactttttgcttcttatattctttgatacctgatatggtttggatctacatccccacccaaatctcatattgaattggaatccttcgttttggaggcgggtcctggtgggaggtgattggataatggagatgttttccacgaatgatttagtaccatccctcttggctctgtcctcataatactgactgagttgttgtgagatctggttgtttaaaagtgtgtagcacatcccccatctctttcttgctcctgttcctgccacgtaagaagcttgctccccctttgccttccatcatgattggaagcttcctgaagttcggccatatccaccccatcagaatcagaagccactatgtttcctgaacagccagctgaaccatgagccaattaaaccttttttcttcataaattacagtctcaggtatttctttatatcaacgtgagaatggactaatacaatgcccttgaggatttggctgtggtataagttggatttagttgactggcttcatatctggatattttcagaggcccaaggctcagctcatcactcctggactgggtgttctaacccaggagggctgggagcaggcccacagctttgttctggggccccttgagattaaagcacgggctgtgctggagcgtttgaggtgtttccagtctgttggcaacaacacttgactggagcttctggcaaaagtgctctggcagggcagtggtgggcccctgtgtgcatgtattccagtgaggtggggacagggggatgctatgagtgagtgcacatcaatgtgggaaggctgcaggtgggtgcacactggcaagatgcaaaagtgctccaatgggtatgcagcatctgccagtgaaacaactcgtggtggccattgacaagcactttggctgggcaattgaggctgggctgcatgtggttgcagccaggcagggaccctgagagaggccagcagactggggtgtgctcaaatcagactgcatggacaagacaaccccactctctccaggtccagcagctaacaaaggctaaagtcacctaaaggagtatggtgagccttgtgggatgagtgtccatggccatgctccactatagacattcccatgtcaaaccctctgggctctttccaggctggaattctgtttccaccaactctccaggcaattatcactagcagctcaaatgtcatgggagttgtgggatctcccatagctaggatctcagaagcccctggtgaaggtgagccactccatgcctatttcacttaccctttctttaggaggctcttgggcccagaaatgagtcctggtgctcggcaaccccctgcagtgttcccaactttctctactttcagcctatggtctgtgtcctttttgtgtccactctccatgccttctttccaaagacttgttcagagtatgctggtctccttgatagtctagtctctttcagtgggagaatttcttcctggctgtatctagttggccatcttggctccctaaaaaaattaacagtgatttttgatacttagaccaaagtgattctaaaacaaactgtgtttatttctgagcaaaaatttcaggatgacacccttttcctttatttacaaaatagatctccagcccccatcctgtgcacagaatacctgggcaggatatgtatctatggagagaaagaaaggccacttagggttggatatcccttttttctcccatggactttctcatctcatcttaactgaatgactgctctttaataagttaggtatctctaatgttcaaaagaaatttcattcctaagaaaaggggactagaattaaaactgctattttacaatattgtccataggttattatctcctcatcacctaattccttctcctcgctttctaatagttttaattttcacttggatatccatggggattctgaagcactgattccactcccagctctgtagagatggaacacttccctaagacaatcagcacatgatgtccctgccccctctctcctttacgatagtgattagtttaggtattggcagatgttttaagcaggaaaattaactactagggtttctattgagacctctgggtcaaaaataatcattccttccaggatcttcataaagacacatttgaccccagaaactggtgcagctattttgagactagaaaagcagacaatattatgctgaagctgataacataaaacagagcagtagaaggaaactgactccatggcaacatcactgagctgctggaatgatctcttcctgaagccagcatgagccacaggtttttcatatacataaagcaatgcatttccttcaatatagaaatcagtctgatgtgtgttttctgttccttgcaaccaaaagtatcctcagtaatgtaattcccttaaaagcaagagttttctttcaagaattattgaactccatgaaatcttgtattagcacttcctaatcatgtaagttaattgctttctaaataacctgtgcttttttaaagggcttagcttcatttactttggttatatcagttaagactgtcaaatgcctgtctcagacactgatgacacccactgctatagaattatggccctgttctccaggtgccatagatgttctatacactcctgagcccaggactctggctctgatgttgctctgatcacctatgtgctgaatactgggaccaccactgccacaaaaatgcctgtgccctggaaccagtgctactgtggttaccagcatgcccttgtgacagactcagcaccaagaggatccctttggctaggactccccacagtgtcataggaggccccaggaaaaagaatagcaggaggaccacagcaatctttgacactaaggccctctaaaactttcatcactactgctgccttcaaatacatctacaaccttggccactgaggacccccacagtcctgtcaaatattgattacagctgatggaactgcacagactatgccaccacatcctgttcacttagcatagcactcacccacaaatgaaagtatttccccacaaatccagcccatcagtcttgaagagatgactgctacctcaaatgcacagatatcattgcaaggtcataaacacatacacaaaggaaaaatgacatcaccaaaggaccactataattttccaatgcgaaaccctaaagagttagagatctgtaagcttcctaaacaaggaattaaaaataattattttagagaagctcagcaagatacaagagaactcaataatatcaatcataacaacaatatatgaataaaactggaagtgaagcaaagagattgaaagatcaaaagaaagcaaacataaatcctggagctgaaaaatacagtgaatcaactgaaaaaatgcaatagggaacttcaacagcagactcaaccaagcagaagaaagaatctctgagattgaagataggtcttttgaaattatccagactaaggagaaaaaaattgaaaagagtaaagtaaacctatgggacttaagggacactaataatgaaaccaatgtatgcatcataaaagtctcagaaggaggattgagaaaggggaagaaaccttatttaaataaattatggctcaaattttcccgaaccctgagagagatatggacatttacacctgtgaaactcaaatgtctccaaacatgttcgacccaaagagaacttcaccatgacaccttataatcaaattgccaaaagtcaaagacaaagaaatttaaaagcagcaagagaaaagtgacttgtcacatacaagagaacctttataaaactattttggacttttcaggagaaacttcacaggccagaaaagaatgggatgatatattcaaactactgaaagaaaaaacattctgaaaaccaatgatatatctggcaaagctgtccttcaaaaatgaaggtgagataaagatatttccagacaaacagagctgaaggagttcatcactactatacctgccttataagaaatgctaaaggtacttcttcaagcttaaatgaaaggacacaaattaataacataaaaatgcatgaaagtataaaacccactggtcatggtaaatatatagtcaaaatcagaatattataatccaataatggtgttatataaatatgtttttaactcccgaaaaaaatattaaacacaaaagtattaaaaataactatagctacaatattttgttaagagatagataatataaaaagcagtaaattgtgacatcaaaaacatataatgcatgtgggggtaggagagaagtaaaatgtagagtttccataggcaaatgaagttaaattgagtgcacccttggataggtatgcagtacagtgtagtactggttttattaggttaaaatatattgctataagtatgttttctgtaagactcatagtgaccacaaagctaaaagctatagtagacacacaagagataaagagaaatgaattaaagtataccactacaaaaacgaatcatatcagaaaggaagatagcaagagaggaacaaaagaactaaggaactacaaaacagaaaatttttacaaaatggcaatagtgagttcttacctataattaattactttgcatgtaaatggattgaattatgtagtcaaaagtcacataataactgaattggtaaaaaaaaaaagcaaacaaaaacaatacccagctatatattgcctataaaatgctcccttgaggacacatataggctgaaagtgaaggggatggaaaaagatattccatgtaaatgtaaaccaaaagacagcagagttagctctgattagacaaactagacgttaattcagaaactgtaaaataagacaaagaaggtcattatataatgataaagggataaattcatcaagagggtaaaacaattgtaaatatatgtgtacccaacatcagagcacctgaatatacaaagcaaatattaacagaactgaagggataaataaatatcaatgcaataatagtaagggacttaaataccccactttcaacaatagagagatcatccaagcagaaaatcaataaggaaacatgggacttgaactacattttagaccaaatggacctaacagacatatacagaacatttcatccaacagcagcagcatatacattcttctcaagcacctatgtctagtgctatgacagtcttcaagataggtcatatagtagaccataaaaaatttaagaaagttgaaggcatatcaagtgccctttcttaccacagtgttatgaaactagaaatcaataacaggaggaaaactggaacattcacaaacatatggaaattaaacaacatactactgaatgacaatgggccaaagaagacataatactttgtttacattttgagacaagtaaaaatggaaacatatctgatatggtatggatgtgtgtcctctcaaaatctcatgttgaaatgtgatcttcagtattggaggtggccctattgggaggtgttttgatagtgaggggaaatcccccatgaatggcttggggcctttctatggcaatgaactactgcaatatctgattgttaaaaagagtttggaacctctcccatttctctcttgcattctctctccctgtgttgcatgctggctccccttcaccttcttccatgactgtaagcctcctgaggccctcaccagaagcagatactggcactatgcttcatgtacagcctgcagaaccatgagccaaataagcctcttttctttataaattccctagtctcaagtattccttcatagcaacacaaatgaacgaacacaacaacataccaaagcttacagaatgcatcaaacacagttctaagggggaagtatatagtgataaacacctacattaagaataaagaaagacctcaaataaacaatgtaaatttacacctcaaggaactagataaagaagaacaaatgaagcacaaagttggcagacatatggaaataaagctcaaagcagaaataaatgaaatagagactagaaaaacaatttaaaaagtcaacaaaaaggtttttcagttaaaaaattaagtcttgaaaaatgatatatcttctggtagactgatgaaaagagacagaagacaaataaatcagaagtgaaggaggacaacagataacacataggatcataagagattactatgtgcatttaaataaaaccagttagataacctagaaaaactagattaatttccagaaacataaaacctaccaagactgaattataaagaaatagaaaatcttaacagaccaacaagtaaggagattgaatcacaaattaaaagtctcctatcaaagaaaagcccatgaactgtttcccttctgaattttactgaacatttaaagaattaatacaaattcttttccaactcttagaaaaaattgaagagagaacacttccaaacccattttacaaagcattaccctgacacaaaagtcagacaaggaaactacaagaaaagaaaactacaggtccatattcctgatgaacataaatgcaaagcttctacaaaaaaaaatactagcacctgtattcaacagcaaattaaaaggatcatacaccatgatcaagtagtatttatcccttggatgcaagggtggtccaacctatgcaaatgaagaatgtcatataccacattaacaaaaggaaaagcaaaaattatatgattatatcaatggatgcagaaagagcatttgaaaaaatttatcatcttttcatgataaaaaactgtcaacaaatcgagtatagaaggaaagtacttcaacataataaaggccatatatgacaagcccacagctaacatcatactcaatggttaaagattagaaacttttctctatgaccaggaacaagacaaggatgccacttctgctacttgtatttgacatagtactggaagttgtagccagagcaattaggcaaaaaaagaaataaaagaaatccaaattggaaaggaagaagtaaaattatgactcttcacagatgatatgatcttatatgtacaatccactgcccccaaaacactgttagaactaataaataactcaacaaagtagcaggatacagtatgaacacacaaaaaatccattgcatttttatatactaactgaacaatctgacaaggaaactatgaaagcaatcccatttataatagcataaaaatgaataaaacaattaggaattagctaaaccaagaaggtgaaagagttatacactgaaaactataaaacattgctgatagaaattaaggacatagataaatagatacatatcccatgtttctggattggaagactaataatgttaaagatgccagtgctacccaaagaagtctgcagattcaatgtaatcgcaatgatgttattttttttttggcagaaatagaaaagcctattctgaaatttatataaaatttcaaggaccccaagtagccaaaacaatcttgaaagagaagaacaaaatggaggactctcattttctgattgcaaaacttactacaaagctgcagtaattaaaacagtgtgctgttgacataaagatagacatgtagaccaatacaatagaatagagagcccagaaatagaccctggaatatgtggtcaaatgatttttgaccaagatactaagaccattccatgggaaaggagcagtcttttcaatgaatggcgctgggacaactaaatatttacatgcaaaagaatgaagttggactcttataacctaataccatacaccaaaattaactcaaaataaaataaatacttaaaactataaaaatcttagaagaaaaacagagcacaagctttatgacattggatttggcattaatttttggatatgacaccaaaggcacaaacaacaaatgaaaaatagacaaaattggactttatgaaaatttaaaaattttgtgcatcaaaagacagtatcaacaaaacaaaaaggcaacacacagaatgggataaaatatttgcaaattacatatctgataagggtattagtttccattatgcatagagaacttctaaaactcaacaacaaaataacccaattcagaaatgagcaaagaacttaaatagacatttctccagagaacatacacaaatggacagtaagcacatgaaaagatgctcaacatcactaatcattagggaaatgcaaatcaaaactccattgaaataccaccttatacctgtgaaagttgattatacaaaatgaagtcatttatgtcatacccaactaaaatgagtcaagaagccatgagaaaaacactaaggttacatacacctgttttttttttaaaaaaaaatgtcttataagctcaatccagatctgcatggacctaaccataatttcaagactgcaagtcccacctggcaactgctgaaactcacctatcagagctcactagctcttgtaagatgctgccagcaccagtgaactttctctcaaaacaatttgtttaaccttcccttgccccagtaaaccttaaccatttctttgttctgtgagcataacagaggccaccctagtctgtgtgtgtgccctgaattgcagttctattccttatatattccaaacaaaacctcttgcttagagattcatctctatatatttttgagttggcatatccattagaatgactaccgtaaacaaagaaaataacaagtgttggtgaggatgtggagaaattggaacctttgtgcattattggtgggaatgtaaaatggaacagctgctatggaaaacggtatggcagttcttcaagcatttaaaaaaaattgccatatgatccagcaattccacttctggatatatatccaaaggaaacaaaatcagtatctcaaaagaagtatttgccctcctaggctcattgcagcattaatcacaatagccaaaatattaaaacaaccaaagtgttgattgataaatggataaaaaagttatatatatatatatggaatatttttcagccttacaaaaggaaatcttgccatttgcaacaacttgagtcaacctggaagacattatactaagtgaaatcagctacacacagaaagacaaatcctacataaagtcatctatatgtgtaatctaaaaatttgaactcattgaaacagtgagtagaatggtggttaccaggggttgggggattggagatatcaggcagagagtacaagctttcagttacaagattaataagttctggagacctaatgtacagtatggtcactataattaataataatgtattgtacaattgacagttgctaagagaacagatcttaaattttctcacccccccacttctcccaaacacacaaaagggtaaccacatgaggtgacggatatgttaattaggttgactgtggtaatcatttcacaatgtgtgtgtatgtgtatatatgggtacatgtatatatgtgtgcatatatgtatgtgtgtgtatatatatatatataatcatctcattttgtgctttaaatatatatataattcttatttatttatattttgaggtcaatcttatctcaatgagctataaataaaataagccataagatcatttctattttgcaagtacttaaacttaattaagtcagtactattcctttgccccttttccttaataagaagctgatatagttaggctttgtgtccccacccaaatctcattgtgaattgtaatctgtataatccccataatccccatgtgtcaagggagagaccaggtggatataattgaatcacaggagtggtttcccccatgctgttctcatgatagtgagtgagttctcacgagatctgatggtttttataaaggactattccccctttgctcacacttctccttcctgccgccttgtgaagaaggtgccttccttccccttcaccttctaccatgattgtaagtgtcctgaggcttccctagccatgctgaactatgagtcaattgagcctctttcctttatagattgtccagtcttgggcagtcctttatagcagtataaaaatggaccaatacagaatgtttaaaaagagatagccaaactattagctcatagctcatttgtatggaaattttatttctaggaggagtaaccataggatcaccattagaacaatcctggctgcagtcaggaaaacaatagctccagagcatgcactcctagtaacagccacttataatcttcctaatgaaacagaaaacagtatgtcaaatcgagaagggctgaggttctccagttcttcattcttgctgtcccatctgctcttgtgactgagcatcagtgagtttgctgtcagatgtgcatagaggccaataccatggcactggcttttgagaaaagaaaacttttatttcaagtcaactggcaaggatacaggaggaaatgctcaaatctgtctccccaagctggaggctggggtaggtttcataagcatagggtaatgatgtgtgatctgattggatcttaacaatgaggtgatgtcgggaagcatgatctgactggatcctgccatgggtgatgacagtgctctatctgattggatcctggatcctgcaatgtggtgtatgctgcttaattcagtccctgctccttggtccaagcacttaatccctctgtggttgcacagttggttatctgggcatgccctggttacatgaccttcatcctgggggtccatggcaaatgaaaagcaactcacaacattgttacataaacgtctacaccagattcgtttgatgtgtttacactttctcatctcctttttttattttatttatttcccattttcttcttttttttatgttttcttcttttccttctcattcagcttacccttatccctttcttctcttcccattttgttcttttttttctatatttaatataaaacatctaccttcccactctaccagattatgctttcaccagtattcccaatcaaaagtttggtaccccagacataatgttgcatgtataatggagatattctttataattttaatgttgtgtgctaaaattaaaaggtttggcaaactgcatcttctaacatatttttttttcatcattttccttgacaagttcctctagatcagtattctcaaaatgtggtccccagaccaccagtattaagattaccaggaaacttgtaataaatgcaagttcctgggccctgtcccagatctcccgactcagaaactttgggggtggggcccagcaatctgttttaacaagccctccagatgattctgatgcactaaaatttgagaatcacaggtgctagattattttgcctcctgctaccatattgattttattttcctaaaagatttctcagagggatgaggttgccatacttccgctttaacttgatagctgcgcttcaatgaatgatgcctatgacactatgtctgtatgctaccttctctgaattccggggcaagatcattctattttcataagctgcagctggtggcaactaggaatatacttcagacctcttgctcctggcaacagtgatagctttccagcacatgctggcattacctacaatgacttctaggaggaaaaaagagagaggtgttctctttaaaagtgacagaggtattcagtctcaaaatcaagacatctaaaattaaaatcatcaattttccccaatactagcattccttcagtactctctctccttctatcactgctctcttagacacctgggtttttggagttatcctttactcctccttccttctggccttctgtgtacattctccactcctttaaaactaggtctcctcagccaggtccagtggctcacacctgtaatcccagcattttgggaggttgagatgggcggatcacttgaggttaggagtttgcgaccagcctgaccaatatggtgaaacctcgtctctactaaaaatacaaaaaaattacttgggtgtaatggtgggtgcctataatcccagctacttgggaggctgaggcaggagagaatagcttgaacccctgaggcagagattgcagtgagccgagatcacaccactgcacttcagcctgggcaacagagggagactctgtcttaaaataaaataaaataaaataaaatagaataaaatagaataaaatagaataaaatagaataaaatagaatagaataaaatagaataaaatagaataaaataaaaaaaatacaaaataaaaaacaaactaggtctccttcacctcagcatcagatgactattatcattgcctaacccttctccctgactgtattatctcttatttcaatccatcttactcactacatacagatgagttttccttaaataataatctgattgtcactctctcattgagattctggtgccactacctgctggccaaactcattagcctagaactccgggccctccataatctgacaccagccttacctttctaaacatctgagaatgtcctccccagagcgtctacttgctgttccttactacagagtgtccactcctccccttgcccatgttttctgctggctctggaatgctctcactcaacaagtctacttatttaaaggttcttttgccctcatggtgtagctcaagtttcacctccatataaagtcagtgttaatcatgccaggttgtagagtgctctccagactccaaattttgtttcccttgtttctaccttcatctatatattattgtgacctcttccatctctccatgtgcattgctagcattgtgttgtgtcggtcttggtgttctcaatgcctgtgtagcattccttaatgaagtatttaaatacaaatgcagaaaatacgcaagtaccaagtatttaaaaaattttcaacatgtttctattttaatgagctttattagtagatgtgtaatgttgttcttgtaagtgtaaaagataaatctgtcataaacaatgtgcctcattattttcactgttttgacattagaagtattaagaaaacattacttacctgaacatagcttagcttgcttctgaagagcttctgtaaaaatacgaatttacaaggcccgttttctttgacataaaaagctttctatgtcctaggtatgtatatgtcagtttctggtattttacacattgaacaaaattcagtgacatagtaaaggctttaaaaaacagtatttttttttttttttgccactgtaaagaaaaaaactttagtggtgaattgaggtaattctattagaatatccaaatatttggatttgaagaaaattcaacttttcctttaagatatcaaaatcttaatgtaatataaatatcaatactatcttaatagctagttattaatttaataactaaactaacactaaaaagtagaaaagaaaaatattaagccacacaaattcaaaatgtacattatgaattggccaaaagcctgagtatttatctttaagggaaatgtagttttatcatttttaagaacatcacatagactaaaattaattagggaaattctgccttatagattgtaacagaaaattgttttaatacattggtaaatattatttctaatctttttttgaaattttttattattcattctgttcctcattctactttctctacagattttttctaacatatttttcagcttcaaacttttaaaaatttatttatttatttgtttattttatttattttttaatggagaggaggtttcaccatgttgtccagactggtctccaactcctgagctcaagtgatccacctgcttcagcctcccaaagcactgggattataggcatgagccaccatgcctggcctttaaaatgtatttactttaaatgacaagtaaaaattatgatgtactatatgatgctttgaatatgtacatgttgtaaaatggccaagttaagctgtttaagataggcattatgtcacatacttttttttttgaggtgagaacacttaaaatctactctcttagtctggacacagtggctcatgcctataatcccagcactttgggaggccaaggtgggtggatcacctgaggtcaggagttcaagaccagcctggccaacatggtgaaacaccatctgtactaaaaatacaaaagttagccagttgtggtggcaggtgcctgtaatcccagctactcaggaggctgagggaggagaatcacttgaacccaggaggcggaggttgcagtgagccaagatcgtaccactgcactccagcttgggcaacagagtgagactgtctcaaaaaacaaacaaacaaacaaactactctcttagcaactttcatattgttattaactgtagccaccatgatatacaatcagtatattgaacttattcctcctgtctaactgaaatgtgtcccttgaataacatttccccaactcccctaaccccagcctttggtaaccactatttctaattatttctaatcaaaatatgcacggtatttctaaaatgtttaatattgtgctcttaacttatgaacgttgatcttgtttgcatttctcatttgcttagcaaattattttagggatccaggaagtatttattgaatacctcctatatgttgtaataaagcttcgagaaaccccgtttccacacctagatataattgttcaatcagcacaatctattgaggggcactttcgttattaaagtcccaacactgtcacatggcacattcaaaccccccttgaaccggctcctcctgcactgtccagcttcatctctcatcacctcaccttctgcatggagtcaacaacttgcaggtccctagatactatttttcttctaagtctgtcccttggaatggattttctctctgccaagtgtaccttcttcacttgcgcagctcccatactgcaccctcaaattgttgactgtctttttcgcttgttgcagtgcctctagggacttgagaggaagagtggcaggggccttttatcccaggatgctgaactcagagaagttggaaatcactgcactggtcaatagcaagcttatattagagaagggcttaaaacaatgataaggagataggatttatttgaataaagcaaggaacctacaaaactgttctataattcacaaatacaaaattagccagcattttttctagagctgccaagtaaatattgaatgctaggaagtcactacttcctaatattctaccaaacatgaaatgccaacttagttatttgaaaaagtgagctcatttaatttacttgtaggaagagagctaagtactgaaaagaagtggttactttatgtaagtgggagcttgatgtctaatttcacatattggtgctttttgccttctttccatttgataggctggctcacaccttccatgaaacactttatttatggggttgcagacacaccaccttcctttattattctaccttttggcctgcttctttcccatctcctttgctcatcttcctcaatttcctgacttccaaattttggattaccccagggctccttccgtagattttttttaatcaagtttatttaactcactctgtaagtgatctcatactgccccatggctttaaataattgtctaaataatgatgactcttatatttataaatcttctatctctgaccctgaatgaatccttcctaatcatggggctcattacttagcttccattcaacatcttctttggatatctaaaaggcactggtctatagagagctgtacttaagtccaaaactgagctccagattacaattccctcaacctcctcttccttcaatcttccccatttctgaggtaaacaacagctgtatccttgcatttcctcaagtcgaaaactttggagtcatccttgattcctttatattcttcacatgtataatgtaaaccatcagtccatcctacagaatatatccagactctaactatggcttacaactatttctaccatcctgttctaagtcaccactttctattgtctggaaaattgtagtggctttcttatcactcttttcgcttccattcatctcaccctatattttattctcagtgtagcaactgaaggatcctttcagagcttgtcatacttctcaaaactgtccagtagcttcccatctcaatactagccttctcatcatttctcattcttctaactctggatttttgcaccttttatggctcaccctcttattttattctagggtctgataaaatgtcacctcatcagagagaccttccttctctaaaatattttagcccacacctccatcaactttctttcctgttcttatttattattctagaatgcattctactagaatttaagctttatgagaacatgaatattgtttttgtttactggggtgacttcagtgcttagaagtatataaagcacataaggacacaataaacatcgaatgaatgaatgaatgaatgggggtcttattttattgttagaactcttagtgtataatctaagtgtcgctttactgttcccataaaagtcactttttttcaaaggagaagagagaaaagacaggtgtgttacattcacaacctagttatccatttaaatttgacccttggtgttctgcagtctttgctgagctcccagctcctccacgtgctaccacccacagcactgaaaatgagatgctgcttttttcagatcatctccagcagagggatgaaagtgaggctactcatgcttcctgccattatatcacctctttactttccactgcactatcacacaagatagtgtaaatgtgtcagttcttatggaatttttagggtaagcaaattacagcataggtagggaaatattaaaattgtacataaaatgtttattttcctatagtcctagagaaaagtacttaaattgagcacttcacagaaggttcctttttcctaaccttatatgcctttacatggcaatgtgtttgtctcttttgcaaaatagtcacagagcagctgccctccttttagtctcatccctcctctgagaagctgatttttctccaagatatatcaccacccttcctccctaggtcatttctcagtctgagtatagagtaacatgaggggctttagcaggactgtccatggttgtccttgggacttgagttcctcaaaactgttcattgcgggcacaggcacactatgttccttaagacctgcccaaatattaattcttttaaattttctactgaatgaatggttgattgtcatttcaacatcagtctctttctctcttttacacaattcccaaagaccatcaccttttttttttttttttttttgagatggagtcttgctctgtcaccaggttggagcgcagtggcgcgatctcggctcactgcaccccctgcttcccaggttcaagcaattctcctgcctcagcctcctgagtagctgggattacaggtgcgtgccaccacgcccagctaatttttctatttttagtagagacggggtttcaccatgttggtcaggctggtctcaatctcatgacctagtaatccacccacctcggcctcccaaagtgctgggattataggcatgagccaccgtgcccggccgacaatcaccttttttcctaatgcatgctataatctaaatccttacggagaaaattaaatatttacccccagattacttaggctgatctctctcatggtaaaattagtgcattattagaaagaacagtgatatagtttgcctctgtgtccccacccaaatctcatgttgaattataatctccacatttggaggaggaggggcctggtaggaggtgattgaatcatgggggtgaacttcccccttgatgttcgtgatagtgaatgagttctcacgagatatgatggtgtaaaagtgtgtggcacttccccctttgctcgctttctctctccggccaccatgtgaagaaggagcttgcttccccttcaccttctgccatgattgcaagtttcctgaggcttcccagtcatgcttcctgttaagcctgcagaactgtgagtcaattaaacctctttttttttcataaattcccaagtcttagataagttcttttcacagtgtgagaacagatgaatacaaacagtattagctccctttctttataccttgactgcttattatttttctttctattctttaaacacattgtaagtcctttggcttgcattgtttccagtgaaaagtctatgttaacttttaatgtttgttgttctttatggtgtctttgttttctggctacttaatttttttaatccctgggtttatttattaattgcaatttgattatgattcacattagcatgattttctttttctttttttctttttttttttttttttttttgagatggagtcttgctgtctcccaggctggaatgcagtggtgcgatctcagctcattgcaaactctgcctccggagttcaagcaattctctgcctcagcctccgcagtagctgggattacaggcacccaccaccacacctggctaatttttgtatttttagtagagatgggatttcaccatcttggccaggctggtcttgaactcctgacttcatgatctgccctcctcggcctcccaaaatactgggattacaagtgtgagccactgtgccttgcttttttttttttttaaagacagagttctgctctgttgcccaggctggagtgtagtggcacaatcttggctccgtgcaacctcctcctccctggttcaagctattctcttgcctcagcctcccaagtagctgggattacaggcacacaccaccgtgcccagctaatatttttgtatttttattagagacgaggtttggctatgttggccaagctggtctcaaactcctggcctcaggtcatctacctgcctcagccttccaaagtgctgagattacaggcatgaaccactgcacccagtcggcatgattttctttatatttcttctgcttgggggtcttgatctgtaaattatagttttcaaaaaaatttgaaaatgtttcactattacttctcaaaatattttccctgcttggtcatctatatctctaataacatgtatgttagacttcgttattttataagttaataacctatttatttttataggcttttattctgtgtacttcattttagatatttttctttgttatgttaattaaattccattatcttttctttggcagcattttaccatctgttaatcccatccagtttatttttcatttaagatattgtatttttcattgctagaagcacaattatttttaaaatatcttatctttctctcctcatcatgctgttcttttctacctttatgaacctgtggagtataataactatttttaatatctgtcatttctgggcctatattttttcaatgggctttctcttggattgaggtcatttttctgttttgttttttctaagcctgttaacttttgaatagatggcaagacgtaaatgttaagtgccatggatactgggttgtgttgtattcttttagtttagacctcattatgacatgcagttagttgcttagaaaaacaactttgcaaaacttgtttttaagcttcagtaaggtaaatccagagcgccatttaatgtaaaataatctaatcccactactaaggcaatacccatttaagagctctagctaatggtccatgtgctgtacaatggtgagactttttcttgtgtgaacacagcctccatgtcttgtgtgagctcttggccttattcagcttcttgtgctttgatttcccttttgtggttctttttccgtctcagtagttttctctcacacatgcagagatcagtactctgccaaatactcaagtagactcctatctagatccctggaatactcttgtgcgctctctttctgtgaaactccttcttttctgatactcttctctacaaattttagtctctttagcttgcctgaacttggatctctgtctgctgaattaataatactctcagacctgtgagttttttctgtccttgcactgtggcctgaagactgccagaagcaggaaaccgaagcaatcatgggtttcgtctcattctttacttcctctggagatctttgtcctacactggagtttgccccgtttttgagttatttaaggcaggaagataacaccaacttttgttactttatcatggccaggaatggaaattccaatttgtgaaaagtttgacaaaaccttagttgtgagacattctgaacctttatgtgagttagcaaagttgttttttcttagaaacattgctgactttgatccaaatcagtaaatattagccatgtcctatttcatagacatggatacccttttagaataaattatctttagcatttgcaagtaagtagggttaaatttgcatcataaatattactgaataattgatgtgatattcagatggattatagccacacctggagtgctccagatttcatttgaaataaaatacagtcaagatgtttcaagaacagtagtgcagaaaaatctaattatttgatatgaatatgagatcattgatatgtatacattcactcattcaatcaacaaacattgatgatttaaagataagacatagttcctgctttttgtgaaggctgtagtctataagggaagacagacatgcaaattctagctgtaatatagtaagatatagtaggattgtaggataaaggcattagttaagggatatgtaaagtgccacagaaatacagagacaggtggaaagggcaggaaattgaatcttctctatggaaggcatcactttccatcactattcatttattcagttaacattattaggtactaatagtgtgctgtgcactgtgctaaggcctcataatacaaatcctcctctgggagagccctggctaacaagcaatcacaatgtggtgcagtagcagctgtggctaagatgtgaccagggaaccatgtggtggagaggaagggcactacagcctggaggacagttatcaggaaatgcttccagaggagattgagcctcagaaagggaaaggcttgtggcacagagcatcatcattcagagaatgtcaagtaatataacgtggctagagccacatggtgtcaagggggagctctgggggagaggagactgcagagataggtaaggggcagatcttcaagggctggctgtattctgctgtggtgtttgaaagattgcgtgtgtgtgtgtgtgtgtgtgtgtctgtgtctgcgtgtgtgtgtaatgaggagatagtgaagatatgtgttttagaaagtttactccagtggtagggtaaaggacagagtagagggaagtgaaactggaagccatgtggaaggtaaattgattcagtaatccaggaaataaatgatgaagaactacactgagggagtcatggagggactggagataaggggttaaggaggagaattaagagctatttaggagaaccataaaaaaaggacttggtgcctaattggatatggagggtgatggagaggatttagtctatgacaatgttctgtcccgttggactaattgtattcattaagggctatgcttcctaaaaggtttccctatcctgcagagagttcaaaacaacccaatgggacacagggaaaaataacagaattctatttatacttttttcagttttttagtttctatttgtatgtgtcttagaaaatagtctctaaacagtgtagtatatgtgcataatttaaaataaatgagtatcaatatattgtagggcatgctgaaatattttattatcaagagtgtgtgatcaaaatgcttgggcactcttagacaaggagtgcaaaaggaaaagtggatttagaggtcctggggaatttgatgttcctgtagaacattcaggcagtaatttccagtgggcaacaggatctagacttaggtaggactgtccaatagagccttctgtgatcatggaaatatcttaaatatacactgtccagtatagtagcctgtaaccacatgcagcttttgagcacttgaaatatggccagtgcaaccgaggaactgaaattttccattttgcttaatcttaaacttatttattaaatgtatttaaattgaaatagccacttgtatctaatggctatgatactggaaagcacagtcctaaagagagagacttgggactgtcatttattgagagctcccactggctcagcactttatatacattttaaagcaatttaatcatcccgctaccctatggagtaggtggtattaagaaagagttaagttcttactctgtcctttaaataggaaaagagtatattgtaaagaagagcatgtttactctgaaatatgtatgctttctagatattctctgttggcagatatttatacatctttcacaatcaagtaacaattttattcgtttcttccaggtggtttgctctgttagaggttcagatgtgtattattttaatactttataaatatgactgtagtcttctggacccattacccaaacaggtaagtgttttcagaattttgagtatcatgactacttataaatatgacataaccacccccacttcccccaattttgattactagagatgagctgacatttcctcacttaggcctgatcttaacaggtgccttagattgaaccagactgagaagatactcggtctccttaattcaggatctaatctatgtacccaattactacctgactgggacttaatagcagtctttccaccacttccagtgttaggagctcttcattgcacttaccaatttgaacacttttctctgagttaaataaacatggcgcccactttgcccttatttttctagaaaggaatgtctgtgatccaaatgtgaactattgtttttaatgcaagtcataacccttggtccatctgaaaaggaacagcatggaaaaaaactaacctagcagtaaaaacagtgaacagaaatgaaaaggtcatggttttattcctacctcaaactattgaatattcagtcatttaagttttctgtagatctattctcatagatcagtggctctcgaattggtgtgagcatcagcatcactagtagggcttgttagaacagactgtataaaggtgctatttatcgctagaatttctgatccagtaggaacaggggaggggctacagaattgcatttctttccttttttttttttttttttttggttggggggttgttttttatttgtttttgagacagagtctccaaacactgtgagctgagttcagtggcacaatctcagctcactgcagcctccgcctcctgggttcaagtggttctcatgcctcagcctccctggtaactgggcctgcaggcgcacaccaccatgcctggctaattttttgtatttttagtagagatgttgttttgccatgttggccacgctggtctcccaaagtgctgggattacaggcatgagccacagcacctggcccagaatttgcatttctaacaagctccaggtgatgccgctgctgctgctgcttgtctgggtgccacactttgaggacctctgttgtaagaaataaaaggaagttcaatttaaatccaaatgtttggaaatcatgtgaaaactttgggtaaagggtgctatttaaattggggctgaagctcagaaattaaggattgcaatctcagagctattcacatagcgttttgtgctttgatttactcttgatataataaggctaatgtatggagagataaataaaactcttaggtgacatttcaataggaattatgtaagtgcgtaagtgacacagaaagtattttattactcacaaatatgcacatttcagcatttcacttgatttcttttgcacttctattttgaggacgagtaacttatcggtgatgaagagctctcagaatcttacaatgaaagggaactcaaaacaactctcacaaagggtctcagctacctgctatattgttgacaaaatgaacatcagggtcaggctttatggacatcaaatactagttcctgatccactgagttgaatgtcacaattttgctcaaggttaaactcaacatccaaagattttctcaccagcaagaggacaccagaatgccttttcaggtgaaaaggatggcattggttaaaaccatggagattagtaattttgaccaattccttaagacaggatttttcctagcattttctcctaagaattctattatctgtatttaatttcttatactattttatatatgtcctatttatgttttgacaccactgagaacactttttaaagaaatgttctctcaggttataaaaagtacaagtctgagtgaattcccatgatctcaaagagcattttatctcacaattcttattctagaatgagaaacatcaattaactttatttaactattgaacttgtttcaataaattataaaatcaggtgaccagaaagtacaggaaatggccgtcaaatcaccaggctcttctaggagaaggcagggatgggttgtcaaagcatgtcctgaacactctgttgtcaggtgcaggggaaatcagtggacttggaaaccaactcccctgaaggaatttacttaacatagtagaaaaaatcaaatgctagaatctccaattttaattttgcaacagcccaatgttttattttacctcaaaaggccttaaataatgtagtgttaattctcttccattatgaatcaaacaaaaaggaaatactacaaagtttaaggatctgtggtcaggcagcagtgtcctgatgctagcagtgagggctgttccattttgagcattaaggaaaagtcaactttaattctcttgcaaaagcaagcacatttttgctaacacaatgggtttttatttctttgtatggttgtttttttttttttttcattttacttttggggttcatagaaccttaggaaatctcacaaaatgcatggatcccctttgtagaaaagtgcatacttcttcatacacacaaagttgtggatgcaatttcagtgggttcgtggaaccctgcaacttattctttcaactctccaaagaatctccttgctaaagagcccattttgtgccctatttcattcaaacttgaaaatagactgattctaaattggatccacctcatctttcctcactcctcatcttccctcagccctcatggttgacagaaaatgttccttttcttttttaatcccctaaacctcaaatatctctttgtattatttacaatacgctgacctccccttgaccctacacagtttcatatcttatttctaactcgggcgaaaaaagtcagaatatttggagcctacaaagtatctttatgggggcgatggagtgagactcctctcaaaaaaaatatatctttatggaaagtcacgatcatgaatacgctataagtggctcacatcaccaactccacatcattctttaaacacctgtaacctgcagtatggagatctcactcagcgattctaaatgaagtgtcacagtttttgagccagaattgtagaaagagccttatttgtggtaacctctttagccagataaagcgaagggtggcaggcctatagccttcaggtgtgtacaactaaagagattgttattagaataaggaattgtattctttttcttctgcctgaatggaaggctaaagttgatgttggatattgtgaagttcattgatgcaaacatttcccaacttgaaaaacctaaattttgtactttttagagaagattacaatggaataaaccttaggtctgaaactgtggacttatgtctcttaatttctatttcttctgcatttctgtttttagagttatctccatttggtgggtgtcccccagccggaagggcaatgccgaattgaatataaacaaagaatatgacatctgttgggcctcacaaggaccagggccttctggaggagtggcactaccccacctggcagcacctagacctgagctctacaaaaacacactgcttcactttgttttaggacttagttcaagaacacattcaaatggtgcatgtgtttggtatcttcaacagtagaccaagaatctaacatcactctcagtaatatagagaccggaatacatggtttataggaaatgatcaaatgatccaaaaaaactccacattttttaagaagttggaatttgatttcatgcataactgtattaaaacattaaatagaaataatgtcatttgaatgaaaatcttatcacattaaattcactgtgaaggcagcatacttaaatttttattttgaaaagtctaaaaggcttagatttttaaaatttaataattatttctacaaattttctatttttcttgaggtgattctcaactagcaattggaactcctaggctctattaacataattctttattgtaaacgtatctaatgctaaaagtaataaaatggtagttttctgagacctgtgaggacaggaatggtgtcttacattcatttctacactttattatgctcaggattgcaccttctttacagagtatatt

SEQ ID NO: 59 - DNA, 2245 bp, Homo sapiens
gaggtgggagggagcgacaatggaaaaatcacctgaaaactgggacagaggaaggaagctacagttacgaaggagagctgcaaaagttgcagcagaaaggttgggagtcccgacaggttccgtagcccacagaaaagaagcaagggacggcaggactgtttcacacttttctgcttctggaaggtgctggacaaaaacatggaactaatttccccaacagtgattataatcctgggttgccttgctctgttcttactccttcagcggaagaatttgcgtagacccccgtgcatcaagggctggattccttggattggagttggatttgagtttgggaaagcccctctagaatttatagagaaagcaagaatcaagtatggaccaatatttacagtctttgctatgggaaaccgaatgacctttgttactgaagaagaaggaattaatgtgtttctaaaatccaaaaaagtagattttgaactagcagtgcaaaatatcgtttatcgtacagcatcaattccaaagaatgtctttttagcactgcatgaaaaactctatattatgttgaaagggaaaatggggactgtcaatctccatcagtttactgggcaactgactgaagaattacatgaacaactggagaatttaggcactcatgggacaatggacctgaacaacttagtaagacatctcctttatccagtcacagtgaatatgctctttaataaaagtttgttttccacaaacaagaaaaaaatcaaggagttccatcagtattttcaagtttatgatgaagattttgagtatgggtcccagttgccagagtgtcttctaagaaactggtcaaaatccaaaaagtggttcctggaactgtttgagaaaaacattccagatataaaagcatgtaaatctgcaaaagataattccatgacattattgcaagctacgctggatattgtagagacggaaacaagtaaggaaaactcacccaattatgggctcttactgctttgggcttctctgtctaatgctgttcctgttgcattttggacacttgcatacgtcctttctcatcctgatatccacaaggccattatggaaggcatatcttctgtgtttggcaaagcaggcaaagataagattaaagtgtctgaggatgacctggagaaactccttctaattaaatggtgtgttttggaaaccattcgtttaaaagctcctggtgtcattactagaaaagtggtgaagcctgtggaaattttgaattacatcattccttctggtgacttgttgatgttgtctccattttggctgcatagaaatccaaagtattttcctgagcctgaattgttcaaacctgaacgttggaaaaaggcaaatttagagaagcactctttcttggactgcttcatggcatttggaagcgggaagttccagtgtcctgcaaggtggtttgctctgttagaggttcagatgtgtattattttaatactttataaatatgactgtagtcttctggacccattacccaaacagagttatctccatttggtgggtgtcccccagccggaagggcaatgccgaattgaatataaacaaagaatatgacatctgttgggcctcacaaggaccagggccttctggaggagtggcactaccccacctggcagcacctagacctgagctctacaaaaacacactgcttcactttgttttaggacttagttcaagaacacattcaaatggtgcatgtgtttggtatcttcaacagtagaccaagaatctaacatcactctcagtaatatagagaccggaatacatggtttataggaaatgatcaaatgatccaaaaaaactccacattttttaagaagttggaatttgatttcatgcataactgtattaaaacattaaatagaaataatgtcatttgaatgaaaatcttatcacattaaattcactgtgaaggcagcatacttaaatttttattttgaaaagtctaaaaggcttagatttttaaaatttaataattatttctacaaattttctatttttcttgaggtgattctcaactagcaattggaactcctaggctctattaacataattctttattgtaaacgtatctaatgctaaaagtaataaaatggtagttttctgagacctgtgaggacaggaatggtgtcttacattcatttctacactttattatgctcaggattgcaccttctttacagagtatatt

SEQ ID NO: 60 - protein, 469 aa, Homo sapiens [sequence omitted]

SEQ ID NO: 61 - DNA, 10924 bp, Mus musculus
caaaacacctccagcgtctgggttccagaacgctcaaatctgaggtatcccagaaagtcttcttgaagggaaaaggaggagtggaaaggaaaaaggatgtattaaaagggtgtgtgtgtgtgtgtgtgtgtgagggggttgctagcagtaaaacggtggagtgtgaataatggcgtgggcggggttcggagagggataacggaacacctgagtggagcgtggcttgtgggggcgtctggacctgggtgagcagagggcctgtctgtgcaagagtcccgccgtggaatgtgtaggagttaggagcgcagggccagcgcggaaattaggggtacgcagtggggggcccgtgcccccctcccaggctcgcgtgtccgggtgacagttgggaagggtccaaagacgtgctccgccatcgaagccagcagccctggcggccctaggcgtagggtctctgactgggagccggtgaactgttgagggggcggcgaggagcctgggggcggggctgtcgccgggaggaggtggctcccacgggcccggggcggacccagcagagggcgggtttgaaagcgctcgggcgggcgcgggaagcgctggccaagcgcgcagatttcgtcgccggaggtgtccttctccagcaggtgctcgtagggcttgggtgggacatgttggggactccggggtagagagtggagtgtccggcttgccaggagggaaaaggaggcccggtctgccagctccgaggccgcgacagggactttggggtgcggcccccacgcggcgcgtgcagagcagcgccagcacgtggcgcgcatgggcctggctctgggtagggggactctccttttgtggggaccagggcggagctgggcccaagacagcctggcttctgggcctggaagcgactgtcgctgtgttgacttccgcagaggatcggcgtgtgggtagttcaatgctacagtcctgtgtgaactagagggaggggttgtgttgccttctgccccgaggcaggaggatggggaatgcgggaatacaaatggacgtgaagggagctagctggccatttacagactaaactcctgttcctggcctccctttcctgggcgagtcctcatttactctacgcggagagtgaacgtgtgacaagataaaggactgacgcgcacacccaggcttcctttggatgaaggctctctccacccctgcaccttataccccattcgggtcctcttgccaagcctgagccaaccccctcttctccattaaccctccttccgtcctgttcctcttgtcctgcttgtgtgacctttgcatacaataatatatgcgtggtggaatggttgtgagttgtcatgactctgaaactaatgttatgtgaaagaatggcctgaatctcccacttgttttaaccctttaattggagcactgttgccttcctggaagcctacacgaatagctgaggagccttgttaattttgccttccccacttgagaaggaatctagaatgatcggtacattgagtattgatgctgtcacccccattcaccagctctgcgggctttctcaagtgatggagcctctttaaacctcaatcgccctaactgtttagtagaaacggggcagctggaagaggggcatcctcagatttcaagagaagattccgatgtagcagaaactaggctgagaaactgagctatgtgagaggacccttaggacgcaggaaggcctcagatgggcgatagctttcagggcctctccatctcggcaggtcaaggcatggctgaaatgataccagaggccctgaactgctatcagatctctactgggacaaaagtaaagaaagcccctaagcagcaaatggaatgtttggatgtgggtggaacccgagaggtgggaatttctgcaaggggagaagtgatgtgtgtgtgtgtgtgtgtgtgtgtgtgtgtgtgtgtgtgtgtgtgtatatgtatgtgtatacttgtccaagcctaagccagttttatgatggaagagttagcctccctctggcttgtggctgtattcacttttgctggtgcatgggagaggtgtggggtgctcggtggagaattagctatgttttgatggggtcccttccctactatctaatagaaacctgagtcctcaggctccccgcagccgcagcagaaccctcttgtcctagataaatagcagtgctactgtttgctgctgctctgtccccagtgcctaggaggatgcctggcggacccacagagaccctcagcaaatagtccttaaccaacagcaggagccttctgcctccttctggaggtgtgtggctttgctgtccagcactgagggatttggcccgtctgggtttcacccacagcagaatagaaaagcggctatagggcctcagggtgaccagctgtgacgcctgtctgggtgggcggggactgaagttctagctgcacctgagagctgacctggctgccacaggcttagatcccctgctgagccggttgcttgggctgctgtcttatctcccagctacagggtggccctttatctctcccagcttcgctggtacttttagcttctgcagcttcttagcttgtgagacccccgctgaatgggggccccttgaggcctgagggattctctcccgataagccttggccaacttttccactctggaccctcacctaggacccaacctcctgcctgagcctgagccaggaccccttcctggggaacgcccaggtacctttggctctcaccgtcctgccaacatcgagtctataaatttggtgagtgatgagatggggatctagagcagcttgccctagacaaagaaatagcagtctgatgggtggggtgtcccttgaatatgcttcttccttacaggactagcccactggtgctgttatctcctctttgagagtgaggcacagggcagcatgtcaagggtttggttaggagctctgggagcacgatgctagctttccaaatttcccttcaaagccactgtcagacacgggaagaggatagttagtggccttggactgagaaaggaactgggggtgggggggggaagaaaggaacattctggaactggaggtcaaggaaaggaacttgctgtggagaagtctgtgtccctcccacagttatgaaatatattcctggagaactcaggaagcccctaggcagcagctggaaaggcgtagaggctggctccagcagaggctggctccagcagaggctggctccagcagaggctggagggagtcccgattactctaggaagcagtctgcgaagggaaggccctccctgccacagtcttgattgggtgatggggtgggggcacccaggaggggagagtgcaggctcatggcaggcctcaggagacctgtgttccttacagggtctgtttgctctctcactctttctccctttttcccctctgctctgtctcctcccctttgcctgctctgtcactgttgtcactgtccctgaccccttttctcttttctgtcttctttgactgtctttccctgcctctcaatcatccgtcctcctcctcctcctcgattgctccccacccttcggtttccaagcttataaactgcttctgctgctggataaaaatagcggtggcagcggccaggctggcagccaggtgcagcccaatcaggcagagagacgacaggaaggccttcctggggccaaaggccagatggggctgagttgagtggtcctgagtctgcagaggcttcccttgcctactctgtgtccagctctaccccccccccccaagagaaaggcccagggcagtgtggaagcagagccagacagggctcgatattcctttacccccagcaagagccagagggagggagctgccagccaggcacagccgagaacactggagccatgacaaccagtcaccagcctcaggacaggtactgggtggccaaggggtgtgacggagggtggttgcagggaggggggagccggtctggagatctggggagtgagtctctagggtaagggtgggagggagggaggtgcggtgtttgggacttgagggaggggacctcaggactaactgtgttcccagcctggtggttctgagtcagttctgcatggggtagggtggagaacatgcatgccctggctgggtgctggctagcatgcccgcagggctaggtgagcagtaggtccctattggagtgtctcagtctttccactgttatgcgcagctagacagcagcttccagctcctcccaccatcactgtggggagacacttggctgcttccctcattccagaacacatctggcaggactacccctgtccctgggggtcgcccttgcatgacctcagcccacgctgctctctggcctgacccttccagccttctagctccggagcttgggatcttcctcaagctagttaaggtccggaatgcgtgctaggatggaaaaggagcttgagtctagtccttcagaggggctgaggcttgtggaagtttatgaagccatgatacactctttccagatggcccctctgtcctgttgggtctctgaacctctcacggctcccctgcccaccattttcctcttgtgctatgtaactaggcccattctgactggagagttagctgcatctttctgggaccatttctccatcctgtaaagtctggtgagaacaccagccttctgtgactgttttctgaggggaagaattgtcattgtcattgtaggttccagcttcctgcctcctttccttcccaggctgcctggtgccctggcctcttcaacaatctacccatttcactgctgcctggctcagcagctcttctctgacctcctgtccttgtataaccttccctcggaattttaccttccatctgagcctttgaaccaagccttgagcatcttgacctcaaagggaatggatgagggctttgaaggctgtggtgtggccatggcttagactggcgaatttggttgctcttctggctgtcccatttcaggcttgcaagaggcctgttccactgagttgggtctctgctaccatctctgtgcagcctgtagatgccggctaaggggaaggtattttaccaggcataggcaactgtaatggaagggaccagggccactaagcttacaggcaaagactgtccgaagtcatgctcagaaccagatggcagccataagtcctaatctatctgccctgccgtaggtagtttggactataaaactggttctgtctgtctaatatctaataagggaaaaaaaaattctatagctctctacttcctagtccccaccccctacccccagccatgtgacccactgggtctagaattgtctgggtgttgttttttgacctcaagagttcttgagagaactggcgttcccgcttagacagcttaactacttccagctggtgtggtggggctggggcttgtgcccactgccctttacccgcccacctttaacagaggttccaacaccagctctggaagtgtgggtcatcacactgcttccccgatcacccagccccctgaaccttctaggacttgggaacaaaggttctgtctcccgtgtcattcagaactgccaccagcccttttccttcaacccatcttacagcctgtcctgtacccaggacctacacatccctcacacctctgcaggagggcgcctacttgtggatacacacagctgggaccgctgggtagacgggagggaggggaggtgggctgactgatcactttgcctttttcctacgcaggtataaggcagtatggcttatcttctttgtgctgggcctggggacactgctcccctggaatttttttatgaccgcaaccaaggtgaggttggagtgggggtcaggtactaggctccagaggacatgttccttaggctttcaaggcctggttctgtgcctctgggcacagagagggacagaggtcccaacactcaacctctgcaaaccccacagtatttcacaaaccgcctggacgtgtcccagaatgtgtcctcggacactgatcaatcatgcgaaagcaccaaggccttggctgaccccacagtggccttgccagcccggagttctctcagtgccatcttcaacaatgtcatgaccctgtgtgccatgctgcccttgctggtcttcacctgcctcaactcgtttctgcatcagcggtgagcctccccgtccatgatgcccagccagctcctgcttcctcagccccaggctgacccttcctgacaccccaccaccaccaccacccctgcctctcctaggatctctcaatctgttcggatcttgggcagcctgctggcaatcctgctggtattccttgtcactgccgccctggtgaaggtggagatggatgctctgatcttctttgtcatcaccatgatcaagattgtgctcatcaattgtaatcgggaggggacgggatggacagccatgggcctgggttgagatcagggtgggggtggttcaggttaaagcttcctgggaagccctgattgccagcctctgctgacaagctgtctttgctactccccagcatttggtgccattttgcaagccagcctttttggtctggcaggtgtcctgccagccaactacacagcccccatcatgagtggccagggcctggctggcttcttcacctctgtcgccatgatctgtgccattgccagtgagtccaactgcgcgcgcactgccctgctttgctggttgtggggaggcagggtagggtgatttggaagggtggagcgtatctgagcttgtgcactgtctgcgccaggtggttctgagctgtcagaaagcgcctttggctacttcatcacagcctgtgcagttgtcattttggccatcctgtgctacctggctctgcctcggacggtgagcaaatggggggatttggggaggcctcggggtttcaaagcaagggtgtctggaaactaaaggatggcaagctcggatgcctagagctgccctgactctacttacttctcccatctcccttgctgaacaggaattctatcgccattacctgcagctcaaccttgcggggcctgcagagcaggagaccaagttggatctcataagtaaaggtcttaattactaaaggaagtctggtagggcggtaggatgggagtgggagggttgtgggcatgttgtgttaactggcagctgggagccaaaggaggacactcgggccgtgagtgggtagggagaggggaaaagaggggtgagccagggaagatagcgcagatgccttgcagggtcttggcgtgttgctcggttggtaagagtgggtgcacaaaggcctgagtttgattcctgcactgggcaaggtggtgcacatgtaaccttagcgtttgggaaggagaggcaggaggactgtattcaaggtcatccttggctatacagtgagttcaaggccagcctgacctacatgacatcttgatgaagaaagaagggaaacttgggtcaccctgaatgtctcgggcattcggacagaggtcagcggcttcagagggaacagagaatgacaggagcctcctgggggaagggtcagtccccaggggctcgagtcaagggttattagggtagaactgcggactagccagttaagggaggtgcccacctccagctcattctacctgttgttctgtcctccccaaaacttaaagatccttttacaacctctcacccgacaggagaggagccaaaaggaagaagagaggaatctggggtgccaggccccaactctccacccaccaacagaaaccagtctatcaaagccatacttaagagtgtacgtgggcccggggtgtcctgcctacccttcctcacccttctttctccttttgctgtttctaccttataccacttccctttctgatctaagactgggctttctcctgtcttcctatgaatgctgtgtgtgtgtctgtctgtctgtctgtctgtgagatttaaaaaaaaaagatttatttatttattatacataagtacattgtagttgtcttcagacaccacagaagagggcaacagatctcattacagatggttgtgagccaccatgtaattgctgggaattgaactcaggaccttcaaaagagcagtccgtgcttttaactgctgagccatctctccagccccatctctgagatttacttatttatttatttatttatttatttatttatttattgttttttcaagaacagggttttgatgtagccctggttgtcttggaactcactctgtagaccaggctggccttgaactcagagatcagcctgcctctgcctcctgagttctgggattaaaaaggggtatggtaccagtgtctggctctttggtcttttgtacacagagccatgacaacctagggccctgtatgaatctctcttctcttctctctctccagatctgtgtcccggctctgtctgtctgcttcatcttcacggttaccattgggttgttccctgctgtgactgctgaggtggaatccagcatcgcaggcacaagtccctggagtatgtgtgtcccttgccccctcccagcccccccccccagcccccgcacttccctcctaggacggattcacccagagtctaaagtggaatcatgggtggggtatgggcaacctctggggctccctctgcccagctggatctacacgggcctactagacaccctgccattggatggaaacctctgaggcagaatgaagagtcctaggcccagagagggccagttgctaagtcttaagtctctttcctagaaagctacttcattcccgtggcctgtttcttgaatttcaatgtctttgactggctaggccggagcctcactgctgtctgcatgtgggtgagtacagcatgggcggcagggctgtggggttcaggtgtccagctgaggccaagagggaacccaagaaagtatggtggctgcagtgtggctctgtgactgatagagggcttgctagcatgcatggcccctgggtcccatctgtaaaactgcaagaagggaaaatggagggggtggggcagtggctcaacaggttaagagcactgactgctcttccagagatcctgagttcaattcccagcagccacaacggtggctcacaaccatctgtaatgggatctgatgccctcttctggtgcatctgaagacagctaccagtgtactcatcaaaaacaaaaaacctgcaagaagggaaaaataccgtgtactactcataacttatgtgtaactctgtgtacaagttcattcgtttgtttatctgtctgtagaggcagggtctctgtgtgttgctatctgggaatttactctgtagaccaggctggcctggaactcagatctctttactccctgcttcccaagtgcatgtgccaccagctaagactttcaaattatgtgtgtgtgcatgtgaatgcaatgcccacagaggccagaagagggcaccagatcccctggagctggagttagaggagcttgtgaggactggaaactaaacctgggtcttccgcaagagcaggactcttaactattgagccattcctggcccatgcgtacagttcttaggtgtgtagcctggcagaggtgtgcatgtcatggctcccacctagatggaaagatacatctcgacatatcataggcaccactgcgcccctagcaatcagcacccccaaaggcacccaggcctagtggttttatccaagtccccaggggccccaggagaccgggaggactgacatgcgtgctgaagccttgcctgtgtccgcagcctggccaggatagccgctggctgccggttttggtcgcctcgaggattgtgtttattcccctgctgatgctctgcaacgtgaaggctcgccactgcggcgcgcagcggcaccacttcgtctttaagcatgacgcctggttcatcgccttcatggctgcctttgccttctccaatggctacctcgccagcctctgcatgtgcttcgggcccaagtgagtcgggccatgaggggatttggtgacatcaggcaggacttacagggagatggcagtaggagagtccctccccatctcatagctgcacggagttggagttgctggggggttttaaggggcagtggaggtaagggcttgctaatgtgctcctgctgagctgtgtgggaagggattaagacagggtggaggatggtccctagacacagtctcccaagaagtgggctgggattgggagtgttggaaggtttgggggtggggggacagggctgggctcagcttgcctaagattaccctgcctttccttttaggaaagtcaaaccagctgaggcggagacagcaggaaacatcatgtccttctttctgtgtctgggcctggctctgggagctgtgttgtccttcttgttaagggcacttgtgtgaccctgtggggacagaagaactacactgcctgcttcctgctcacttccttccctgccagggacgagcaggggtcgagaggggctgttcttctagctgacttctgctttcctctggactgtgcttcgcccagctgtccaggagccagcgatggcctgcgggtggacttggaattcagggtcagaatggcaagggctcaatggcctctgactgacagctccgactgatgcccgcttactccaagcacaagagactccagggccaagagagatctgtccgcctgcctatcacaggatagggcggaggcggatggctgattggtgtcgtgtgacctgatgtccctccccttgcccttcttccttctgtgcctgttccatgtccccagcccttgtcattttactgccttttttatactgacagaaaccaggtgccttcagaggccatctgattaaataaacattttttttctccat

SEQ ID NO: 62 - DNA, 1380 bp, Mus musculus
tacccccagcaagagccagagggagggagctgccagccaggcacagccgagaacactggagccatgacaaccagtcaccagcctcaggacaggtataaggcagtatggcttatcttctttgtgctgggcctggggacactgctcccctggaatttttttatgaccgcaaccaagtatttcacaaaccgcctggacgtgtcccagaatgtgtcctcggacactgatcaatcatgcgaaagcaccaaggccttggctgaccccacagtggccttgccagcccggagttctctcagtgccatcttcaacaatgtcatgaccctgtgtgccatgctgcccttgctgagatcagcctgcctctgcctcctgagttctgggattaaaaaggggtatgatctgtgtcccggctctgtctgtctgcttcatcttcacggttaccattgggttgttccctgctgtgactgctgaggtggaatccagcatcgcaggcacaagtccctggaaaagctacttcattcccgtggcctgtttcttgaatttcaatgtctttgactggctaggccggagcctcactgctgtctgcatgtggcctggccaggatagccgctggctgccggttttggtcgcctcgaggattgtgtttattcccctgctgatgctctgcaacgtgaaggctcgccactgcggcgcgcagcggcaccacttcgtctttaagcatgacgcctggttcatcgccttcatggctgcctttgccttctccaatggctacctcgccagcctctgcatgtgcttcgggcccaagaaagtcaaaccagctgaggcggagacagcaggaaacatcatgtccttctttctgtgtctgggcctggctctgggagctgtgttgtccttcttgttaagggcacttgtgtgaccctgtggggacagaagaactacactgcctgcttcctgctcacttccttccctgccagggacgagcaggggtcgagaggggctgttcttctagctgacttctgctttcctctggactgtgcttcgcccagctgtccaggagccagcgatggcctgcgggtggacttggaattcagggtcagaatggcaagggctcaatggcctctgactgacagctccgactgatgcccgcttactccaagcacaagagactccagggccaagagagatctgtccgcctgcctatcacaggatagggcggaggcggatggctgattggtgtcgtgtgacctgatgtccctccccttgcccttcttccttctgtgcctgttccatgtccccagcccttgtcattttactgccttttttatactgacagaaaccaggtgccttcagaggccatctgattaaataaacattttttttctccat

SEQ ID NO: 63 - protein, 129 aa, Mus musculus
MTTSHQPQDRYKAVWLIFFVLGLGTLLPWNFFMTATKYFTNRLDVSQNVSSDTDQSCESTKADPTVPARSSLSAIFNNVMTLCAMLPLLRSACLCLLSSGIKKGYDLCPGSVCLLHLHGYHWVVPCCDC

SEQ ID NO: 64 - DNA, 2077 bp, Mus musculus
caggcttagatcccctgctgagccggttgcttgggctgctgtcttatctcccagctacagggtggccctttatctctcccagcttcgctggacccaacctcctgcctgagcctgagccaggaccccttcctggggaacgcccaggtacctttggctctcaccgtcctgccaacatcgagtctataaatttgcaagagccagagggagggagctgccagccaggcacagccgagaacactggagccatgacaaccagtcaccagcctcaggacaggtataaggcagtatggcttatcttctttgtgctgggcctggggacactgctcccctggaatttttttatgaccgcaaccaagtatttcacaaaccgcctggacgtgtcccagaatgtgtcctcggacactgatcaatcatgcgaaagcaccaaggccttggctgaccccacagtggccttgccagcccggagttctctcagtgccatcttcaacaatgtcatgaccctgtgtgccatgctgcccttgctggtcttcacctgcctcaactcgtttctgcatcagcggatctctcaatctgttcggatcttgggcagcctgctggcaatcctgctggtattccttgtcactgccgccctggtgaaggtggagatggatgctctgatcttctttgtcatcaccatgatcaagattgtgctcatcaattcatttggtgccattttgcaagccagcctttttggtctggcaggtgtcctgccagccaactacacagcccccatcatgagtggccagggcctggctggcttcttcacctctgtcgccatgatctgtgccattgccagtggttctgagctgtcagaaagcgcctttggctacttcatcacagcctgtgcagttgtcattttggccatcctgtgctacctggctctgcctcggacggaattctatcgccattacctgcagctcaaccttgcggggcctgcagagcaggagaccaagttggatctcataagtaaaggagaggagccaaaaggaagaagagaggaatctggggtgccaggccccaactctccacccaccaacagaaaccagtctatcaaagccatacttaagagtatctgtgtcccggctctgtctgtctgcttcatcttcacggttaccattgggttgttccctgctgtgactgctgaggtggaatccagcatcgcaggcacaagtccctggaaaagctacttcattcccgtggcctgtttcttgaatttcaatgtctttgactggctaggccggagcctcactgctgtctgcatgtggcctggccaggatagccgctggctgccggttttggtcgcctcgaggattgtgtttattcccctgctgatgctctgcaacgtgaaggctcgccactgcggcgcgcagcggcaccacttcgtctttaagcatgacgcctggttcatcgccttcatggctgcctttgccttctccaatggctacctcgccagcctctgcatgtgcttcgggcccaagaaagtcaaaccagctgaggcggagacagcaggaaacatcatgtccttctttctgtgtctgggcctggctctgggagctgtgttgtccttcttgttaagggcacttgtgtgaccctgtggggacagaagaactacactgcctgcttcctgctcacttccttccctgccagggacgagcaggggtcgagaggggctgttcttctagctgacttctgctttcctctggactgtgcttcgcccagctgtccaggagccagcgatggcctgcgggtggacttggaattcagggtcagaatggcaagggctcaatggcctctgactgacagctccgactgatgcccgcttactccaagcacaagagactccagggccaagagagatctgtccgcctgcctatcacaggatagggcggaggcggatggctgattggtgtcgtgtgacctgatgtccctccccttgcccttcttccttctgtgcctgttccatgtccccagcccttgtcattttactgccttttttatactgacagaaaccaggtgccttcagaggccatctgattaa

SEQ ID NO: 65 - protein, 456 aa, Mus musculus
MTTSHQPQDRYKAVWLIFFVLGLGTLLPWNFFMTATKYFTNRLDVSQNVSSDTDQSCESTKADPTVPARSSLSAIFNNVMTLCAMLPLLVFTCLNSFLHQRISQSVRILGSLLAILLVFLVTAALVKVEMDALIFFVITMIKIVLINSFGAILQASLFGLAGVLPANYTAPIMSGQGLAGFFTSVAMICAIASGSELSESAFGYFITACAVVILAILCYLALPRTEFYRHYLQLNLAGPAEQETKLDLISKGEEPKGRREESGVPGPNSPPTNRNQSIKAILKSICVPALSVCFIFTVTIGLFPAVTAEVESSIAGTSPWKSYFIPVACFLNFNVFDWLGRSLTAVCMWPGQDSRWLPVLVASRIVFIPLLMLCNVKARHCGAQRHHFVFKHDAWFIAFMAAFAFSNGYLASLCMCFGPKKVKPAEAETAGNIMSFFLCLGLALGAVLSFLLRALV

SEQ ID NO: 66 - DNA, 2272 bp, Mus musculus
gggtgaccagctgtgacgcctgtctgggtgggcggggactgaagttctagctgcacctgagagctgacctggctgccacaggcttagatcccctgctgagccggttgcttgggctgctgtcttatctcccagctacagggtggccctttatctctcccagcttcgctggtacttttagcttctgcagcttcttagcttgtgagacccccgctgaatgggggccccttgaggcctgagggattctctcccgataagccttggccaacttttccactctggaccctcacctaggacccaacctcctgcctgagcctgagccaggaccccttcctggggaacgcccaggtacctttggctctcaccgtcctgccaacatcgagtctataaatttgcaagagccagagggagggagctgccagccaggcacagccgagaacactggagccatgacaaccagtcaccagcctcaggacaggtataaggcagtatggcttatcttctttgtgctgggcctggggacactgctcccctggaatttttttatgaccgcaaccaagtatttcacaaaccgcctggacgtgtcccagaatgtgtcctcggacactgatcaatcatgcgaaagcaccaaggccttggctgaccccacagtggccttgccagcccggagttctctcagtgccatcttcaacaatgtcatgaccctgtgtgccatgctgcccttgctggtcttcacctgcctcaactcgtttctgcatcagcggatctctcaatctgttcggatcttgggcagcctgctggcaatcctgctggtattccttgtcactgccgccctggtgaaggtggagatggatgctctgatcttctttgtcatcaccatgatcaagattgtgctcatcaattcatttggtgccattttgcaagccagcctttttggtctggcaggtgtcctgccagccaactacacagcccccatcatgagtggccagggcctggctggcttcttcacctctgtcgccatgatctgtgccattgccagtggttctgagctgtcagaaagcgcctttggctacttcatcacagcctgtgcagttgtcattttggccatcctgtgctacctggctctgcctcggacggaattctatcgccattacctgcagctcaaccttgcggggcctgcagagcaggagaccaagttggatctcataagagaggagccaaaaggaagaagagaggaatctggggtgccaggccccaactctccacccaccaacagaaaccagtctatcaaagccatacttaagagtatctgtgtcccggctctgtctgtctgcttcatcttcacggttaccattgggttgttccctgctgtgactgctgaggtggaatccagcatcgcaggcacaagtccctggaaaagctacttcattcccgtggcctgtttcttgaatttcaatgtctttgactggctaggccggagcctcactgctgtctgcatgtggcctggccaggatagccgctggctgccggttttggtcgcctcgaggattgtgtttattcccctgctgatgctctgcaacgtgaaggctcgccactgcggcgcgcagcggcaccacttcgtctttaagcatgacgcctggttcatcgccttcatggctgcctttgccttctccaatggctacctcgccagcctctgcatgtgcttcgggcccaagaaagtcaaaccagctgaggcggagacagcaggaaacatcatgtccttctttctgtgtctgggcctggctctgggagctgtgttgtccttcttgttaagggcacttgtgtgaccctgtggggacagaagaactacactgcctgcttcctgctcacttccttccctgccagggacgagcaggggtcgagaggggctgttcttctagctgacttctgctttcctctggactgtgcttcgcccagctgtccaggagccagcgatggcctgcgggtggacttggaattcagggtcagaatggcaagggctcaatggcctctgactgacagctccgactgatgcccgcttactccaagcacaagagactccagggccaagagagatctgtccgcctgcctatcacaggatagggcggaggcggatggctgattggtgtcgtgtgacctgatgtccctccccttgcccttcttccttctgtgcctgttccatgtccccagcccttgtcattttactgccttttttatactgacagaaaccaggtgccttcagaggccatctgattaa

SEQ ID NO: 67 - protein, 454 aa, Mus musculus
MTTSHQPQDRYKAVWLIFFVLGLGTLLPWNFFMTATKYFTNRLDVSQNVSSDTDQSCESTKADPTVPARSSLSAIFNNVMTLCAMLPLLVFTCLNSFLHQRISQSVRILGSLLAILLVFLVTAALVKVEMDALIFFVITMIKIVLINSFGAILQASLFGLAGVLPANYTAPIMSGQGLAGFFTSVAMICAIASGSELSESAFGYFITACAVVILAILCYLALPRTEFYRHYLQLNLAGPAEQETKLDLIREEPKGRREESGVPGPNSPPTNRNQSIKAILKSICVPALSVCFIFTVTIGLFPAVTAEVESSIAGTSPWKSYFIPVACFLNFNVFDWLGRSLTAVCMWPGQDSRWLPVLVASRIVFIPLLMLCNVKARHCGAQRHHFVFKHDAWFIAFMAAFAFSNGYLASLCMCFGPKKVKPAEAETAGNIMSFFLCLGLALGAVLSFLLRALV

SEQ ID NO: 68 - DNA, 1924 bp, Mus musculus
caaaacacctccagcgtctgggttccagaacgctcaaatctgagcaagagccagagggagggagctgccagccaggcacagccgagaacactggagccatgacaaccagtcaccagcctcaggacaggtataaggcagtatggcttatcttctttgtgctgggcctggggacactgctcccctggaatttttttatgaccgcaaccaagtatttcacaaaccgcctggacgtgtcccagaatgtgtcctcggacactgatcaatcatgcgaaagcaccaaggccttggctgaccccacagtggccttgccagcccggagttctctcagtgccatcttcaacaatgtcatgaccctgtgtgccatgctgcccttgctggtcttcacctgcctcaactcgtttctgcatcagcggatctctcaatctgttcggatcttgggcagcctgctggcaatcctgctggtattccttgtcactgccgccctggtgaaggtggagatggatgctctgatcttctttgtcatcaccatgatcaagattgtgctcatcaattcatttggtgccattttgcaagccagcctttttggtctggcaggtgtcctgccagccaactacacagcccccatcatgagtggccagggcctggctggcttcttcacctctgtcgccatgatctgtgccattgccagtggttctgagctgtcagaaagcgcctttggctacttcatcacagcctgtgcagttgtcattttggccatcctgtgctacctggctctgcctcggacggaattctatcgccattacctgcagctcaaccttgcggggcctgcagagcaggagaccaagttggatctcataagagaggagccaaaaggaagaagagaggaatctggggtgccaggccccaactctccacccaccaacagaaaccagtctatcaaagccatacttaagagtatctgtgtcccggctctgtctgtctgcttcatcttcacggttaccattgggttgttccctgctgtgactgctgaggtggaatccagcatcgcaggcacaagtccctggaaaagctacttcattcccgtggcctgtttcttgaatttcaatgtctttgactggctaggccggagcctcactgctgtctgcatgtggcctggccaggatagccgctggctgccggttttggtcgcctcgaggattgtgtttattcccctgctgatgctctgcaacgtgaaggctcgccactgcggcgcgcagcggcaccacttcgtctttaagcatgacgcctggttcatcgccttcatggctgcctttgccttctccaatggctacctcgccagcctctgcatgtgcttcgggcccaagaaagtcaaaccagctgaggcggagacagcaggaaacatcatgtccttctttctgtgtctgggcctggctctgggagctgtgttgtccttcttgttaagggcacttgtgtgaccctgtggggacagaagaactacactgcctgcttcctgctcacttccttccctgccagggacgagcaggggtcgagaggggctgttcttctagctgacttctgctttcctctggactgtgcttcgcccagctgtccaggagccagcgatggcctgcgggtggacttggaattcagggtcagaatggcaagggctcaatggcctctgactgacagctccgactgatgcccgcttactccaagcacaagagactccagggccaagagagatctgtccgcctgcctatcacaggatagggcggaggcggatggctgattggtgtcgtgtgacctgatgtccctccccttgcccttcttccttctgtgcctgttccatgtccccagcccttgtcattttactgccttttttatactgacagaaaccaggtgccttcagaggccatctgattaa

SEQ ID NO: 69 - protein, 454 aa, Mus musculus; identical to SEQ ID NO: 67

SEQ ID NO: 70 - DNA, 1946 bp, Mus musculus
gcgcgggaagcgctggccaagcgcgcagatttcgtcgccggaggtgtccttctccagcagcaagagccagagggagggagctgccagccaggcacagccgagaacactggagccatgacaaccagtcaccagcctcaggacaggtataaggcagtatggcttatcttctttgtgctgggcctggggacactgctcccctggaatttttttatgaccgcaaccaagtatttcacaaaccgcctggacgtgtcccagaatgtgtcctcggacactgatcaatcatgcgaaagcaccaaggccttggctgaccccacagtggccttgccagcccggagttctctcagtgccatcttcaacaatgtcatgaccctgtgtgccatgctgcccttgctggtcttcacctgcctcaactcgtttctgcatcagcggatctctcaatctgttcggatcttgggcagcctgctggcaatcctgctggtattccttgtcactgccgccctggtgaaggtggagatggatgctctgatcttctttgtcatcaccatgatcaagattgtgctcatcaattcatttggtgccattttgcaagccagcctttttggtctggcaggtgtcctgccagccaactacacagcccccatcatgagtggccagggcctggctggcttcttcacctctgtcgccatgatctgtgccattgccagtggttctgagctgtcagaaagcgcctttggctacttcatcacagcctgtgcagttgtcattttggccatcctgtgctacctggctctgcctcggacggaattctatcgccattacctgcagctcaaccttgcggggcctgcagagcaggagaccaagttggatctcataagtaaaggagaggagccaaaaggaagaagagaggaatctggggtgccaggccccaactctccacccaccaacagaaaccagtctatcaaagccatacttaagagtatctgtgtcccggctctgtctgtctgcttcatcttcacggttaccattgggttgttccctgctgtgactgctgaggtggaatccagcatcgcaggcacaagtccctggaaaagctacttcattcccgtggcctgtttcttgaatttcaatgtctttgactggctaggccggagcctcactgctgtctgcatgtggcctggccaggatagccgctggctgccggttttggtcgcctcgaggattgtgtttattcccctgctgatgctctgcaacgtgaaggctcgccactgcggcgcgcagcggcaccacttcgtctttaagcatgacgcctggttcatcgccttcatggctgcctttgccttctccaatggctacctcgccagcctctgcatgtgcttcgggcccaagaaagtcaaaccagctgaggcggagacagcaggaaacatcatgtccttctttctgtgtctgggcctggctctgggagctgtgttgtccttcttgttaagggcacttgtgtgaccctgtggggacagaagaactacactgcctgcttcctgctcacttccttccctgccagggacgagcaggggtcgagaggggctgttcttctagctgacttctgctttcctctggactgtgcttcgcccagctgtccaggagccagcgatggcctgcgggtggacttggaattcagggtcagaatggcaagggctcaatggcctctgactgacagctccgactgatgcccgcttactccaagcacaagagactccagggccaagagagatctgtccgcctgcctatcacaggatagggcggaggcggatggctgattggtgtcgtgtgacctgatgtccctccccttgcccttcttccttctgtgcctgttccatgtccccagcccttgtcattttactgccttttttatactgacagaaaccaggtgccttcagaggccatctgattaa

SEQ ID NO: 71 - protein, 456 aa, Mus musculus; identical to SEQ ID NO: 65

SEQ ID NO: 72 - DNA, 2061 bp, Mus musculus
gtttgaaagcgctcgggcgggcgcgggaagcgctggccaagcgcgcagatttcgtcgccggaggtgtccttctccagcaggacccaacctcctgcctgagcctgagccaggaccccttcctggggaacgcccaggtacctttggctctcaccgtcctgccaacatcgagtctataaatttgcaagagccagagggagggagctgccagccaggcacagccgagaacactggagccatgacaaccagtcaccagcctcaggacaggtataaggcagtatggcttatcttctttgtgctgggcctggggacactgctcccctggaatttttttatgaccgcaaccaagtatttcacaaaccgcctggacgtgtcccagaatgtgtcctcggacactgatcaatcatgcgaaagcaccaaggccttggctgaccccacagtggccttgccagcccggagttctctcagtgccatcttcaacaatgtcatgaccctgtgtgccatgctgcccttgctggtcttcacctgcctcaactcgtttctgcatcagcggatctctcaatctgttcggatcttgggcagcctgctggcaatcctgctggtattccttgtcactgccgccctggtgaaggtggagatggatgctctgatcttctttgtcatcaccatgatcaagattgtgctcatcaattcatttggtgccattttgcaagccagcctttttggtctggcaggtgtcctgccagccaactacacagcccccatcatgagtggccagggcctggctggcttcttcacctctgtcgccatgatctgtgccattgccagtggttctgagctgtcagaaagcgcctttggctacttcatcacagcctgtgcagttgtcattttggccatcctgtgctacctggctctgcctcggacggaattctatcgccattacctgcagctcaaccttgcggggcctgcagagcaggagaccaagttggatctcataagagaggagccaaaaggaagaagagaggaatctggggtgccaggccccaactctccacccaccaacagaaaccagtctatcaaagccatacttaagagtatctgtgtcccggctctgtctgtctgcttcatcttcacggttaccattgggttgttccctgctgtgactgctgaggtggaatccagcatcgcaggcacaagtccctggaaaagctacttcattcccgtggcctgtttcttgaatttcaatgtctttgactggctaggccggagcctcactgctgtctgcatgtggcctggccaggatagccgctggctgccggttttggtcgcctcgaggattgtgtttattcccctgctgatgctctgcaacgtgaaggctcgccactgcggcgcgcagcggcaccacttcgtctttaagcatgacgcctggttcatcgccttcatggctgcctttgccttctccaatggctacctcgccagcctctgcatgtgcttcgggcccaagaaagtcaaaccagctgaggcggagacagcaggaaacatcatgtccttctttctgtgtctgggcctggctctgggagctgtgttgtccttcttgttaagggcacttgtgtgaccctgtggggacagaagaactacactgcctgcttcctgctcacttccttccctgccagggacgagcaggggtcgagaggggctgttcttctagctgacttctgctttcctctggactgtgcttcgcccagctgtccaggagccagcgatggcctgcgggtggacttggaattcagggtcagaatggcaagggctcaatggcctctgactgacagctccgactgatgcccgcttactccaagcacaagagactccagggccaagagagatctgtccgcctgcctatcacaggatagggcggaggcggatggctgattggtgtcgtgtgacctgatgtccctccccttgcccttcttccttctgtgcctgttccatgtccccagcccttgtcattttactgccttttttatactgacagaaaccaggtgccttcagaggccatctgattaa

SEQ ID NO: 73 - protein, 454 aa, Mus musculus; identical to SEQ ID NO: 67

SEQ ID NO: 74 - DNA, 15578 bp, Homo sapiens
cggagctctgggcgggcgctggggtcgcctgttgcagcctctcttccgcccggcggcccacaccggtcaggcccggcgcgggctgcgctctccagctgtggctatggccccagccccgagatgaggagggagagaactaggggcccgcaggcctgggaatttccgtcccccaccaagtccggatgctcactccaaagtctcagcaggtgcgcggggcggggccggggggcctggcggggcggggtggggtgggggcgaggtctgcgccgttctcacgctgccgggcgggacagggggccagtagggggacccgctgggctacagtgtctcaggggagtcagaatctttggtttctggatgcggggccacttttctgggccttcgaaggccattattagatgactgcctccccaaactccccagccacttacagatgtcccaggaacatagggtagggggaagaggtctggaaaattagcctagaagaccagcccagacctaactgaacaaagaatttagtcttctcgaaccccgagccagtacccacactgtgaacacacctgtctttacttaaaaaatcttgatgttttattcatcatggagtctttaaaaaaaaacaaaaaccgagtctcgctctgttgttcaggctggagggcagtggtgcgatcacagcctactgcagcctcgacctcatggactcaagccatcctcccacctcagcctcccaaaatgccaggaccacaggcatgcgtcaacatgctcagctaatttttttttttttttttttttaagagacagagtctccctgtgttgaccaggctggtcttgaactcctaagctcaagtgattcttctaccttggcctcccaaagtgctgggatgacagatgtgagccactgcacttggcatcatggagtcttgatttgtagacattgcattaaaacttattttggtaagggctgggtgtggtggctcacgcctgtcatcccagtgctttgggaggccaaggcgggcggatcacaaggtcaggagttcgagaccagcctgaccaacgtggtgaaaccccgtctctactaaaaaaaaaaaaaaaaatacaaaaattagctgggcgtggtggcacgtgcccgtaatcccagctactcaggaggctaaggcaggagactcgcttgaacccaggaggtggaggttgcagtgagccaagatcacgccactgcactccagcctgggtgacagagtgagactccatcttaaagaaaagaaaaaaaaaaacaaacttattttgattacattaaaatgtatctttgtttgtttgtttgtgttttcagacaaggtcttgctctgttgcccaggctggagtgcaatggcaggatgatggctcactgaagccttgtcctcccgggctctagtgaacctccggcctcagcctctggagtacctggaaccacaggctcgagccaccatgcctggctaatttattttaattttttttgtagagatggggtctcactgtgttgcccaggctagtcttgaattcctgggctcaagtgatcctcccacctcggcctccaaaagtgctgagatttcaggcatgagccaccactcctggcctaaaatttatcttgattcatgagttttttggctcccccttacattttacacccctggcaagtgcctcactggcctctccctagtcccagccctgtcacaaggccatggagatacagtcacaaacacaactgagaacacagacagtcatgagacatgtgctggttaccaacccccaggccaagcaaacacacttccagcaaacacacatgacttgttggtgacagctgagaggacacatgcctggggagagagaggactgtgtgtgaggtggtgaggcatgcatggggcctgccaagttggggagggagtctgggccaagccacggtcccatatagggtggtgaataaggtgtagagtagaggtgcagcaggaccaacccttcccaccccaccccttcgacagggacctgagggagctcagggagggagagaagccagaagaccaggcagagactgaagagagctggcaaggcctggctagaaaaactccaggcaaggcctgtgtaagttggggctcccaggctgtccagcagggggccctggcacccagcaacctctgcttgggaggtggctacagaggggtgtgggtgttggctaggggcccagcaggatggatgccagacggacttctctccaacaataacagccctggctgttgccatccaccgagctggcagggccccagtttgggtggggagaggaaccagcctttcccagtctggcctgagaccctcaccacttccctccagttttcttccacctccagccccctctgtacacaactgcagccactggccaccagccttgccatgcctggcagatcttctgaccactagccctgccacccccacagacccagagaccaggaaaggagggtggggagcgaggaagggggccaaggcagagggcagaggagggctaggagaggaagagagagagactggacaaacatgagggcaggaattagggggttgtggacagacatgaagccactctcaagtcatggggctgtgcctggaaaaataccacctaaacccatcttcctgccctctggttagggctggcggggatgtgggggatgggggtggggtgggggagggttgggaaggaatatgtgtgtcatctctgtggggcatggaaacagaaggctggggacacccattctggagtagcttggggagagccactgaccctaattagaaaagccacctctctccttagggccctgtctgtttctctggggacagggtaggactaccttatccctatgatgtgaggtactgccagttgttaatcagtgtctgtggcttctctaggggacaagcccttcgggtcagtgggcatggggtgggcagcgtgggttggattttctcctcaggacctttccagccttaggatcatcctctagcactgagtactgctggaagggcagggagtgccccccaccccaccccatttattgcccgaccaaagagagggcctccctccccctcccttggagggacttgctggaccacccctcagcacgcccacaccttcctccttagctagtgaaagacatactcagcaaggcttccgcctgtcaggatggctgggacaataggattcactgaggatataaggctgttcctagctttttctcttcccattcccacctgtgcctcagttttccaaagtgctggatttagaaagggtgaattatgagggagctggagggctttgccccacccccctccgcgcgcacacgcaagcacaggcagaggcacataccccctccaagtcaaagttgtgagtggggtggtgtttgcgcgtctgtggctgggactggatgtgtcagggatgggaaaacccatcatgctggtcacagaaaatgcgcggtggggacagaagcagttttgaaggaaaagaagaggagggggactgaaagaaagaagggggcgctgaaagggagggcgctgggaggaaaaaggtgcagtgtggaggaagcgcggcgtgggcagggcttgggaagggataacggaatatctgaggtggagtgggccgtggagcgtcggggccggtctgagcagcgggtgtgtaaatggaacagtcccgagatgaattttatgggagtctgcgcaggtccttaatgtgtggctgtaccctccagccccatgtaccccacacgatggacagacagccttggtgtggcagggcccaaagaggtcctatctaccgcaataacacgaccaggcggccctgggggcgcaggggctcggggtgggagcggcggagcgcgcggagtcgccgcggggtggcaggggtgggccgggggcggggccgcgggcgtcggggaggtggcagtgggcgcagggcggggcgagctcagcggagggcgggtttgaatgtgccccggcgggagagggaagctgcagcgagagcgcgcggatctcagcgcgggagcagtgcttctgcggcaggtgctgcccggggccggggactggggactggggactgccggggcggaagacgccgctgcccgcctgccacggagggcagggagggcgggcctgacggctccgcagcccggagaagggacgccgggtggggccccagtgcggagcgtgcggagccgcgcagcacgtggcgcgcacgggccagggagcctgaggaccctgcggggaccgggacccaagctgggcggggcggcctggctcccgggcctaaaacaggctgcggtcacgttgacctccgcaaggggcaggcgagtggacgggtgatccccatcgatctggtcggtatcagggaggggccgtgccgctgactgcgctggcggaggggtatggggatggggatggggatggaggctcgcgagcggaggtgcggggctgtctctttaaccccggtcttttactggctaaactcgtatccctggcgtctccttcctgcgcacgtcttcatttactgatttactgtgagggtatatgagagggtgaagacacacagtcctcggctttgcttaccaggagagagcagtcgtaggtcaaggctggctccaaccctgccctcacacctctaggggtctctctgcagccctgtggtagtccctttgcctactcctctcggtggcctccagaccctccaactttcctcctgcttgtgtaagctccccatgccaggatgtgtgtgatggggcggggctgagctgcctgacactcaagtcaggctgggaatgatcttggtctccacctcatttttccctttagttgaatcagagttccccccacctcccagtctacagggctaactgagaagcagcttttatacctctctccattccaaaaggagcttgaacatttaatatggattctagctcctccactcaccagctctgtgacttcaggcaagtgactcaacccctctgaacctcagctggccccatctattcagtgctagtactagcttatgggtggttgtgaagaaaagacaagagatctgcaggtagtggctagccccatatgaaatcctgggagtggagaattgcaggagaggtgttgggagtctggaggcagggaggtactcaatttggtggctactttcaggggcccacctcagcaggccaaggcatagttggagggacaccagatgctctgagctggtatcagatccctgtttgccgctgggcaaaggcagacaaaagcaaaacacgaaggctggccagctgaatgttaggatatgggcaggaggagagggctggagttgaattgtgcccaagactggtatgggaactcctgagaacagagagagcaggggtgtagcagggggccagggaagaaataaatacttcttctctaagcctaagccagttttacccaggagaacaggagctattctccccaccctaggcccccatctgctttgaagctacacctgctcttaactgccaggaatcttgcctgtggggtggagtacggggtatgcgggtatgaagtaagaacctagaggaagagtccctactacctaatagaaaacctgagacctaggcagggctcagtggctcatgcctgtaatcccagcactttgggaagccaaggtgggtgggtcacctgaggtcgggagttcgaaaccagcctggtcaacatggtgaaaccctgtctctactaaaaatacagaaatcagccgggggtggtggcaggagcctgtattcccagcttcttgggaggctgaggcaggagaatcacttgaacctgggaggcagaatttgcagtgagccgagatcatgccattgcactccagcctgggcaacaggagcaaaaactccgtctcaaaaaaaaaaaaaaaaagaaaaaatctgagacctgaggctttcccccacccccactccagtaatgccctcttgccttcatctctctagaaaatgtaaatatgattattcacccctcgtgcctaggacagtgcctggctagcatgcacaggtcctcagtaaatatttgtcgaaggcctgaatggaggaatccttctgcctctatctggaggtgtggggctgaggggctgaggaggacctctgagagcttggagtttccctggggagggttgagaggaactacagggaggtgggagagcccgtggaaggtctcatggtgcccagctgcttctgtttgtctgagtggggccagaagcaatgctgcacctgcgagagctcccctgctgagactccctgttctcttatctcccgagcgacaggggtggctttttatctcctgggtgtgcttctgcttctttgcttgcaaggcttctcagaatggggccccatgaagcctgagggactctctcctgataacaccctgtgccacctttttcattctggatccgcacccaggagcccgtggacaaggcccactgcctgagcctgaactaggagcacctcctagggactgcccaggcttgctctgctctgacccttctgctggccagtctgggcacctggtgagtgcccagaaagggagggaagggaagctgtcctttcaccccaaacagcaaggcctgggcccagctaggcctgagtgtggggaatgtgtcagtgcacatctgcctggcttcccatgccacccaatgggaaagctgtttaatctgctggtgccagggggtctccccctacacaaatggggagcaggagagggacgctgaggcagaaggataggtgctttgggatccacccctccaatcttcttttcaaggtcactcttagaaaggggaagcggacaggagcctgtgacagagaggaactaagggaggactaggtgaccctggggtcgggaggggggagggggaagggctgtgcccccacatccattatgaaatattttcttggaaaaccggccagcaactaggaagcccctgggcagtggctggaaagaaaggttaaggtgccaacagcagagagactggaatctgggttgccttcaggagaggacagccccactctagccatgaatccaggggctccccagggagggtggagagaccagacttgcagagaggggcctggggagcctctggtttgacctcagtcatcatcgatgttgtcgcagctgctgcagatctgcctgttccgtgtccttcctcctcctcccccgacctctttgctgtgtctcctccatttgtctccctccttcccttgtcatcactgtccctgacccctctcgtcctcttgcctgccttctttgactgtctttccctccctcccatcatctttcctcctccttccctcctgctctccaccctcctgtttcccagcttataaactgcttcggctgctggataaaaatagcggtggcagcggccaggccgggagccaggtagagtctgagcaggcaggggggccgcgcaggactggcctgctgggccagggggctgggtgggggtcaagttgagtcgtcctgaggggcagggtgcagagggggtcttactggactcctccactggcctgttctgtcagccctgccccctctccccctaagagcctgaggaggcctatggcagggccaagacagggcctcacactgttcctgcccccagcaggcccctgagggagggagctgtcagccagggaaaaccgagaacaccatcaccatgacaaccagtcaccagcctcaggacaggtaaggggtaaggggctgggctgtggatccagggaatgggttttcagggagctgggtgtggtgtcctttggaattgggggttgccattgctggctggccttccagccaggtagctatgagtcaggtctgcatcaggggtggggaccccgtgtgccttggctgggtgctggctggggtgtctgcgggaagggcagggtgcgtgggcagcagtccttccctggcctgtctgtgtttccactgttgctctccagccagttagcggctttcggctcctcccgccaccactgtggggagatacttggctgcacccctccttccaatgcacatctggcagaactgccctggggcctctgccttagatgacctggcccaccctggttcttgatctgatcttcctctcaattccctgcctctggagcctgtgaactcccagtcaagttagacttgcagttatgactgtgaatatgtattttggaagaagaggctgtagcttaattcaatttctcaaagggatctgggacccaagaaggctgaggaagtgatccctgagatccaaagctccttcaaagcgtcaggctctgtcctgccctccaactcaggccccagaaacccatcacgtctgccctacccaccccatctccctcctgtgccaaaggctatgaaactaggccacttttgcctgtgggggctttgagcatgtagcttaatctctctgggactgtttttccacctgtaaaataagctaaaagtatctacttcccaggaagtggatctagaagtaagggaatttaaggaggcatggcaataagtccaggccccaggttgcttccctgcctcctgtgctccattcccaggctgcctgcccattctgtccccacctccgctctcctgtgggcagttccctgaaggcctcgccggctccatttgccttattgcacagctcagtcatttcccagcgtactccccccaaccccgatcctctgtcctatgtgactttgggagtttttccttctgctctgggcctccgaaccaagcctttagcttctccaagggaagcatgtatgtgagggggttgggggggctgcagttgcattaactcggacctgctcacgtggtgtgctcaccacgccatccctgtatgaggcctgccagcggtccaggctcctgcactctggccaggcctgtcttctcactgccttgggctttatccctgccatctctgaagagagctggtgttggctctggggagggtgtgcaaacccaactggagatctacatgggccgggctggggttactcagctttcaggcaaggcctatctgggagaagctggcgtgacccggaagggccttgaggtatagggcttggggcattgccctggccaaaggtggacagtccttatttacaccctgaggcccagatggcctccagtggccccatacctcctggcctgccctgggtggtatgaactacaaagttctatttggccaggaagaaaatggctctaaggccctctcttcacagcggccctgaggcaccctgcccacctgccctgtaggtccagaatagtatgggagtttcttaacttcagaatcctctctggggagtaacacagtccctgaccagacagcataattacttccagcctgcctggtgggagtggaagacacttgctgcttgctttctcactcatccacccaccccctgcccttcggcaggatttccaaaaccatctccggatgtgtgggtcacactggttcccagcctgcagagtcccccgagccttccagggctgataaccatggtcctgtcagccatgccattcagtcctatgaccctgaccccatccccaccccaaattccaacgagcaatgtacccttttctccccccacacccataagaggacacatgcaaacggacacaaacacagacgccctgtgccctgggacctagagagactgacaacggacaggggctttcctggggctcattgtggagtggggcaggatggtgcgtcatttggcccatctttcctcctccattgcagatacaaagctgtctggcttatcttcttcatgctgggtctgggaacgctgctcccgtggaattttttcatgacggccactcaggtgaggctggagggactgggctccatggggcagtgcccactgtgcttgcaggatctgactctgtgctggtaggcacagggaaagagatttcaacactcctctctgcaacccctgcagtatttcacaaaccgcctggacatgtcccagaatgtgtccttggtcactgctgaactgagcaaggacgcccaggcgtcagccgcccctgcagcacccttgcctgagcggaactctctcagtgccatcttcaacaatgtcatgaccctatgtgccatgctgcccctgctgttattcacctacctcaactccttcctgcatcagaggtgagtgcccaccccctccccagcccccagcctgaccctcactgtgtcctgcacccccttggctgagccccagctttgcccacttgtctctgccacccttggcctctcccggcaggatcccccagtccgtacggatcctgggcagcctggtggccatcctgctggtgtttctgatcactgccatcctggtgaaggtgcagctggatgctctgcccttctttgtcatcaccatgatcaagatcgtgctcattaattgtaagctgggccaggagggggcctatgggaggaggcatgcccaactacccccactcttttttcagacccagcgttagccagagagaagcccagcctccgcctggagggagtggatgctgtgagcagctgggattcagaggcctgagtgggcctggaccagggctgggagggggcagagagaagggcagctcagcctcaaggctcaccaagagtaaagtaggaatgacagggatctgtcttcttgggcacccccaaccaccagccctagctcccctgctcatgcccgccctgtttccccagcatttggtgccatcctgcagggcagcctgtttggtctggctggccttctgcctgccagctacacggcccccatcatgagtggccagggcctagcaggcttctttgcctccgtggccatgatctgcgctattgccagtaagtccggctatctacctgcccagtgccctggtgtggtggggagaggggatggggcctgtctctgatcactgacaccaccccaggtggctcggagctatcagaaagtgccttcggctactttatcacagcctgtgctgttatcattttgaccatcatctgttacctgggcctgccccgcctggtgagtaaatggagggagctggggtttggggtataggggtctggggttccagaccacgggtgttctgaggacaaaacctgaaggaggccgggattctggagattctgcctctaaatccacctcccccgtctcccttacttgataggaattctaccgctactaccagcagctcaagcttgaaggacccggggagcaggagaccaagttggacctcattagcaaaggtccgaagagcctgaggaagctggggtggaggatggtataccaggcgggggatagcatgagcaaagagaacaaagatgagtgccctgtgttagctagcagccctgagccagaggaggactgaaggactacagcagggagagggggacaataggaaataagggccggcaatgataaaatgggggcagatcctggatgaccttgaatgcctgaggtgtttggactaaaggcagtgggaagcaatttcagattcttgagtgaggagtaacatgacctgaggctcctgggagaggccaggcccccgggtcttgagttgtagggatttggaggcgaggtctgggttagggttagagtacggctgggactggttaaggaggcgtctactttcaagtaatcccagccgttttggggaatgtttatgttgtcttctgttgctctgtcttccccacaacttggagatttcttccatcccgcaggagaggagccaagagcaggcaaagaggaatctggagtttcagtctccaactctcagcccaccaatgaaagccactctatcaaagccatcctgaaaaatgtacgtaggggaggttatcctatcttctaccccttgtcctctttctctcctccttttgctccctccccctgccacccatctcctccctttctgacctgagagtggtcactcctggattcttttgtgtgtgcgtgcgtgcccatgcgtgcgtgccgggggtggggattcgtggttccttttttttgagacagagtttcacacttgttgcccaggctggagtgcaatggtgcaatctccactcgctgcaacctccatctcctgggttcaagtgattctcctgcctcagcctcccaagtagctgagattacaggcatatgccaccatgcccggctaattttttgtatttagtagagatggggtttcaccaggtcaagctggtctcaaactcctgacctcaggtgatccacccacctcggcctcccaaagtgctgagattacaggcgtgagccaccacgcctggcctggattcgtggttctttaatgcacagccaccatgaagacacaggcatttgggtgactctaccccttctatctagatctcagtcctggctttctctgtctgcttcatcttcactatcaccattgggatgtttccagccgtgactgttgaggtcaagtccagcatcgcaggcagcagcacctggggtgaggatgccacaggtttccaggatgggaacagacaggatcttgagttgggctggaagtggggaagggagggagcctgggtcaccttctccccgtttcctgggtccatttgcccttccctgggctggaagcatcttctccattttactgttggggaagctgaggcccagtgaaggttaggcttgctatacctgcctctgtgagcctgataaccacccgttcatctcctcttccagaacgttacttcattcctgtgtcctgtttcttgactttcaatatctttgactggttgggccggagcctcacagctgtattcatgtgggtaagtggaggaagagggccccaggcccctgtgggaagtaagagtccagcctggacccagagagggaacccaagaaagtatggtagtaaggggaccatttgttttaaagtcgaggcataatttatgtatagttaagtacaagtcttaagtgtacaacttaatgaatatatgtatatacacatacctgcccagatcgagatgtagaatatttccagcactccagaaggctccaccatgcccctttcaagagtaaccccctaaggagaaccaggctttgaggtttcagttcagatcctgaggggccccagatggatccttgggggcctggctgtgccctggggtggcggcctgggctgaggccctgcctggtgcccacagcctgggaaggacagccgctggctgccaagcctggtgctggcccggctggtgtttgtgccactgctgctgctgtgcaacattaagccccgccgctacctgactgtggtcttcgagcacgatgcctggttcatcttcttcatggctgcctttgccttctccaacggctacctcgccagcctctgcatgtgcttcgggcccaagtgagtagggctggcagggaacttggtggcatcagacaggatctagagttccagtgggggacactcagtagagggagggcaaaaggagagtccctgctcccagagctgagaggagagatggctcaggaggggctcccaggctgaggggatagtgactgtagtggaggggggcgccaagcttacttgggtggaggtggagacaggtttgcaggaaggagtgaaagacaaccccaccatacacgttccctcaaggaggagaagccaggttggggttaggcagccaggatgggttgatcaacagaatgaggttcgacagtcaagttgctccaccccacccctccttccacccagaggctctgggctggggtacagccattctgaggtagccttgcccttccttccccgcttaggaaagtgaagccagctgaggcagagaccgcaggagccatcatggccttcttcctgtgtctgggtctggcactgggggctgttttctccttcctgttccgggcaattgtgtgacaaaggatggacagaaggactgcctgcctccctccctgtctgcctcctgccccttccttctgccaggggtgatcctgagtggtctggcggttttttcttctaactgacttctgctttccacggcgtgtgctgggcccggatctccaggccctggggagggagcctctggacggacagtggggacattgtgggtttggggctcagagtcgagggacggggtgtagcctcggcatttgcttgagtttctccactcttggctctgactgatccctgcttgtgcaggccagtggaggctcttgggcttggagaacacgtgtgtctctgtgtatgtgtctgtgtgtctgcgtccgtgtctgtcagactgtctgcctgtcctggggtggctaggagctgggtctgaccgttgtatggtttgacctgatatactccattctcccctgcgcctcctcctctgtgttctctccatgtccccctcccaactccccatgcccagttcttacccatcatgcaccctgtacagttgccacgttactgccttttttaaaaatatatttgacagaaaccaggtgccttcagaggctctctgatttaaataaacctttcttgtttttttctccatggctccctgtgtcctccagccgtggcttcatgccctggagtgggtagagggctggcagcctgagtctgggagatgagcatgacccagctgggccctggccaggactggacctgggtccaagggggaggaggggggagtagtcctcttggcctcagaggggctgcaatgccccctgctggggccacaggggagggacaggcctggaaccagaacaccaagactgttagccaagactaagaacgggtttttctttgctgcttcattctttctttcataggacagaggatggagatagctccccatctttcctttgtcttcactgccagcccctccactctgtccccagccccagcaatgaactctgcaaaactggccagctcctggccatactcccataccaccaggcaggaagaggccgaggcctgagggttctcccctacctggcacccagccttaacaccaaagctcagcctgccagacttcctggggaacaagggccctgtgtgtctgcacagtgaaaccaacccttcccttctcaacacaaactctggcctagggaggggtgggttgttatggaactatgagtgtctcagtggagaaggccctaccactgggacccccatctcaagaatgacctgactggaagtgagaccagagctctggccacagtgcagcacccctgcaatctgcattccttaccctcccacaagtctcagactcctcccagaaagcagaagacattcctgaattctcagcgcaggctgctcactcagccctggccagcagatggctacagagttggcacctttgtcagcgcttcctttctcactggagtttaatttaattgagaacttcaggcctcattaagggctgttagcgcatttttaaggctctttgatgagctctgaagccctaatggggtagctaagtataccagggcactgggaactgaagttcatgtgctattaatcatttgtcagaccagagtatttatctgcggtgctggaaaacaaggtattccttttgg

SEQ ID NO: 75 - DNA, 3274 bp, Homo sapiens
cggagctctgggcgggcgctggggtcgcctgttgcagcctctcttccgcccggcggcccacaccggtcaggcccggcgcgggctgcgctctccagctgtggctatggccccagccccgagatgaggagggagagaactaggggcccgcaggcctgggaatttccgtcccccaccaagtccggatgctcactccaaagtctcagcaggcccctgagggagggagctgtcagccagggaaaaccgagaacaccatcaccatgacaaccagtcaccagcctcaggacagatacaaagctgtctggcttatcttcttcatgctgggtctgggaacgctgctcccgtggaattttttcatgacggccactcagtatttcacaaaccgcctggacatgtcccagaatgtgtccttggtcactgctgaactgagcaaggacgcccaggcgtcagccgcccctgcagcacccttgcctgagcggaactctctcagtgccatcttcaacaatgtcatgaccctatgtgccatgctgcccctgctgttattcacctacctcaactccttcctgcatcagaggatcccccagtccgtacggatcctgggcagcctggtggccatcctgctggtgtttctgatcactgccatcctggtgaaggtgcagctggatgctctgcccttctttgtcatcaccatgatcaagatcgtgctcattaattcatttggtgccatcctgcagggcagcctgtttggtctggctggccttctgcctgccagctacacggcccccatcatgagtggccagggcctagcaggcttctttgcctccgtggccatgatctgcgctattgccagtggctcggagctatcagaaagtgccttcggctactttatcacagcctgtgctgttatcattttgaccatcatctgttacctgggcctgccccgcctggaattctaccgctactaccagcagctcaagcttgaaggacccggggagcaggagaccaagttggacctcattagcaaaggagaggagccaagagcaggcaaagaggaatctggagtttcagtctccaactctcagcccaccaatgaaagccactctatcaaagccatcctgaaaaatatctcagtcctggctttctctgtctgcttcatcttcactatcaccattgggatgtttccagccgtgactgttgaggtcaagtccagcatcgcaggcagcagcacctgggaacgttacttcattcctgtgtcctgtttcttgactttcaatatctttgactggttgggccggagcctcacagctgtattcatgtggcctgggaaggacagccgctggctgccaagcctggtgctggcccggctggtgtttgtgccactgctgctgctgtgcaacattaagccccgccgctacctgactgtggtcttcgagcacgatgcctggttcatcttcttcatggctgcctttgccttctccaacggctacctcgccagcctctgcatgtgcttcgggcccaagaaagtgaagccagctgaggcagagaccgcaggagccatcatggccttcttcctgtgtctgggtctggcactgggggctgttttctccttcctgttccgggcaattgtgtgacaaaggatggacagaaggactgcctgcctccctccctgtctgcctcctgccccttccttctgccaggggtgatcctgagtggtctggcggttttttcttctaactgacttctgctttccacggcgtgtgctgggcccggatctccaggccctggggagggagcctctggacggacagtggggacattgtgggtttggggctcagagtcgagggacggggtgtagcctcggcatttgcttgagtttctccactcttggctctgactgatccctgcttgtgcaggccagtggaggctcttgggcttggagaacacgtgtgtctctgtgtatgtgtctgtgtgtctgcgtccgtgtctgtcagactgtctgcctgtcctggggtggctaggagctgggtctgaccgttgtatggtttgacctgatatactccattctcccctgcgcctcctcctctgtgttctctccatgtccccctcccaactccccatgcccagttcttacccatcatgcaccctgtacagttgccacgttactgccttttttaaaaatatatttgacagaaaccaggtgccttcagaggctctctgatttaaataaacctttcttgtttttttctccatggctccctgtgtcctccagccgtggcttcatgccctggagtgggtagagggctggcagcctgagtctgggagatgagcatgacccagctgggccctggccaggactggacctgggtccaagggggaggaggggggagtagtcctcttggcctcagaggggctgcaatgccccctgctggggccacaggggagggacaggcctggaaccagaacaccaagactgttagccaagactaagaacgggtttttctttgctgcttcattctttctttcataggacagaggatggagatagctccccatctttcctttgtcttcactgccagcccctccactctgtccccagccccagcaatgaactctgcaaaactggccagctcctggccatactcccataccaccaggcaggaagaggccgaggcctgagggttctcccctacctggcacccagccttaacaccaaagctcagcctgccagacttcctggggaacaagggccctgtgtgtctgcacagtgaaaccaacccttcccttctcaacacaaactctggcctagggaggggtgggttgttatggaactatgagtgtctcagtggagaaggccctaccactgggacccccatctcaagaatgacctgactggaagtgagaccagagctctggccacagtgcagcacccctgcaatctgcattccttaccctcccacaagtctcagactcctcccagaaagcagaagacattcctgaattctcagcgcaggctgctcactcagccctggccagcagatggctacagagttggcacctttgtcagcgcttcctttctcactggagtttaatttaattgagaacttcaggcctcattaagggctgttagcgcatttttaaggctctttgatgagctctgaagccctaatggggtagctaagtataccagggcactgggaactgaagttcatgtgctattaatcatttgtcagaccagagtatttatctgcggtgctggaaaacaaggtattccttttgg

SEQ ID NO: 76 - protein, 481 aa, Homo sapiens
MLTPKSQQAPEGGSCQPGKTENTITMTTSHQPQDRYKAVWLIFFMLGLGTLLPWNFFMTATQYFTNRLDMSQNVSLVTAELSKDAQASAAPAAPLPERNSLSAIFNNVMTLCAMLPLLLFTYLNSFLHQRIPQSVRILGSLVAILLVFLITAILVKVQLDALPFFVITMIKIVLINSFGAILQGSLFGLAGLLPASYTAPIMSGQGLAGFFASVAMICAIASGSELSESAFGYFITACAVIILTIICYLGLPRLEFYRYYQQLKLEGPGEQETKLDLISKGEEPRAGKEESGVSVSNSQPTNESHSIKAILKNISVLAFSVCFIFTITIGMFPAVTVEVKSSIAGSSTWERYFIPVSCFLTFNIFDWLGRSLTAVFMWPGKDSRWLPSLVLARLVFVPLLLLCNIKPRRYLTVVFEHDAWFIFFMAAFAFSNGYLASLCMCFGPKKVKPAEAETAGAIMAFFLCLGLALGAVFSFLFRAIV

SEQ ID NO: 77 - DNA, 21533 bp, Homo sapiens
tgcattagtttcatagtttgaggctttagattcaagtctttaatctgcatttttaaatttccatatatggtgagagatgcgagtctagtttaattcttctgtatatgcatatctggttttcccagcaccatttattgaagagactgtcttttcaccagtctatgttcttggcactattattgtaagtgagttcacagtgggtgtgtggatgtgtttctgggttttctattctgttctattggtctacatgtctctttttattcctgtagcatgctgctttggttagcatagctctgcagtataatttgaagtcagttaatgtgtttctccagttttgttctttttgcttgttatattgttggctattctgggtcttttgtggttccatataaattttaggatttgtttttctatttctgtgaataatgttattggtattctgatagggattacattaaatctgtagatagctgtggttggtatggacattttaacaatattgattctttcaatccatgaacatggaatatttctctattttttggtatcctcttcaatttctgttatcagtgttttctattttgtattatagagaccttttacatatttgattaaggtaatttctagatatttaatgttatttttggttattataaatttgattacttttaaaatttcttttttcgattgttcactgttggcatatagaaatgctatgaatttttgtacattgatcttgtatctgcaactttactgaatttgtgtatcaattctaacagttttttggtagagtctttaggtttgtccaaatataacatcatatcatctgcaaacaaggataattttacttcttccattcaaatttggatgccatttctttctcttttgtcattattctagctagtacttacagtactagttgaataacaggtgtgaaggtgggcatccttgtcatgttctaaatcttagagaaaggctttcaggtttttctcattcagtataatactagctgtgggtctgttgtatatggcttttattttgttgagatatgttccttctatttccattttaatgaggattcttataatgaagtcacattcaattttattaaatgcattttcagcattaattgaaataaaatcgttttcatcctttattatgttaaaatgatgtaccacattgattgattagcatatgtagaactaaccttgtatcccaggaataaatccaatttggtcacaatgaatgatctttctaatgtattgttcaatttgctttgcttgtattttgttagggatttttgtcaatattcatcatagatattggtctgtagttttcttttgctaaggtttgttttggtatcagggtaatacttgcctcacagaataagtttggaagtattcccccctcctctaaaagttgaaggaaaattagattagctcttctttaaatatttggcagaatccagcagtgaagccattgggacccatgctttcctttacttggaaaatttttattatggctttgaacttgttacttcttgttggtctgttcatattttggttttcttccctgttcaatcttggtaggttgtatgtatctagtaacttgtccatttcttctatcttttcaaatttattaacatacagttattcaaagtagccactaatgatactttcattttttgcagtatcagttgtaatgtctccctttttttattttggattttatttatatggattatctctcttattttctttgttttgttaaatgtttgttcattttgtttaacttcgcaagaaactaacattttgttccattgatattttgtattcttcatttcaatgtcatttatatctgctctgatctttattatttatttattcaactgatttttggtttggtttgttgtggcttctctagttctttgaggtgcattgttaggttgtttatttgaagttttccatcttttttgatttaggcatttatagctataaaattccctcttaatactgtttttgctctatcctataggtttttgtatgatgtgtgtccattattatttgtttcaaaaaattcttcaatttctttcttaatttctttattgacccactggtcattcaagaacatatagtttaatttgcatgtatttgtatagttttcaaaattattcttgtaggacaggtctggtgtttataaaagctctcagcttttgtctgtgaatgtctttatttctcctacacatttggaggatatttttgccagatatattattctaggttaaaagatttttctttcagcacactgaatatgtcgtgccactctctcctgtcctgtaagatttctactaaaaagtctgctgccagatgtattgaagctcccttgtgtgtgttgtttattttctcttacaacttttaggatcctttcttgaactttgatctttgaaagttttatttttaaatgccttgaggtagtcttctttgtgttaaatctgcttggtgttctataaccttcttgtacttagacttgatatttttctctaagtttgcaaagttttctgttattctcactttgaataaactttctttccctatctctttctctacatcatctttagggccaataactcctagctttgcccttttgaggctattttctagatcctgtatgcatttttttattgtatttttttctcctctgtctatatattttcaaataccctgtcttcaagctgactaattctttcttctgcttgatccattctgctattgaaagactcacacattctttagtatgccaattaaattttttagcttcagaatttctgctgtaattttagaattatgtaaatctctttgctaaaggtatctgatgtaattcagaatatcttttctgtgttatcttgagctgtttttagtatcctcaactcaggcattttgaattttctgtctcaaatgtcatatatctatctttctctaggattgatttctggagccttatttagttcatttggtgaggtcatgttttcctgaattatcttgatacttctagatgttcttctgtatctgggcattgaatagttagatatttattgtagtaatcactgtctggtatagtctttccccattcttcctgtgaagacttttcagacatttgaaaagcctttggtgctgtggtccaagttgtacctactttaggggacagccaaagcccagtaatgttgtggctgttgcagactcatagaggtactgcctgatgatctaggacaagttccctgtggccaccacctctgtgactgcactgggtcagatttgaagccagcacagtactggatctcacaaaagccttgctataactactccctggctactgtctgtgttcacttaaggccctggggctctacaataagcaggtggcaaaaccaacctggcgtgtatctttcccttcaggttggcaagttgtttcaggccccaggtgggtccagaggttttatcctagagttagaaactagtcaaagaccttagaagtctatctggtgttctattgtattgtggctaagctgtcactcaaaccacaagatgcagtcttttctactgttcccttccctttccaaagacagaggagacttacaatgctgtcaggactgggttctttcctttaagacaatgtgttgtgttctggcccagagtgtgtctatgtgatctgtgatctgggaactagtcttaaacaggtacctcacaactctgacaggtactgtagcctggtgtggctgagctgttatccagggtgcaagacatcgtccactccacttttccctctcctctctttaacgggagggaaagggtctcttttggagatgcgtgctgtgcagcctggttgagaggtgatgccagcactcccttaattgccctaggtggtgtctcagtaggtcacatggctccccagtcctctgtctctgggactagttcaaccctaggactcatttaagatttgcagtccttgtgtcttagactgcttttcaagtatactaacagactcagagaacttcagcccacggtggtgtgctttgcaagaactcaagttccaactgccgggatgggtgattcgcttctggctagagctggtttaaatgcattgtctgtgggtgggcatcggctgagtttggtctagttttcctatctgctctaacaagacagcactgagttcaatgcctcataattgctgtgttctctctccctcagtgcccagagaagttctctgtaccatgcagctgctacaggggcaagggggagaggtgtctctagcaattaaatactttttttctacctcttcagttcctgtttcaataatacgaagttaaaaccaggtactgtgagtgctcacctgatttttggttcttctaaaagtactttttttgtgtaggtagttgttaaatccatgtctttgctggaagggctgatcaatggagccttctattctgccatcttgctcttcctctctccccctcctccacactaacactgtttttttcacacaataataaaaacgattctcacaaaatggtcaaattacgtctcttgaattatcgaatggctatccactcactctaaggaaaatccacaccccatatcaggagccacaaggtcctacatgatctgtctcgagtatgtcatcttatctactatcactttcctcttacgctgttcatgctggccttcttatagtcccttaacaacatcaaattcttttccaacaaagaaactttctgttgctattacctttgcctgtaatatttttcaccatcaaagcttcttcatttcattcaaatctctgcttacatgtcactttctcagagaggcctttcgtcaccaccctatataaaatagttcccactttactagcccctttccccactttgtttttccatgtagcacgtgtcactgcctggtgttatgtattatattgtattttattgtgttatataaaattatattttatctcaaccatatcactttatctttacctcttatctttattataaataataaatatttattattactaaaatgtgagctccatcatagtcaaactattttggttaatattagttacaagttttaaatgtttgctacaaagacttggaaccaacacaaatgcccatcaatgatagactggataaagaaaatgtggcacatatacaacatggaatactatgcagccatagtattcatgtcctctgcagggacatggatgtctaatatcactgtggtttttgcagacctgtagaggtactgtcttcatggtcttagataacatctggaagaattctctagattacaatgcagagaatcttgtctgtttgtttgtttttcttcttgtcttccccaaaacaaatggagtttatttataatagctcttcatttagtttgtgaggaatgctgccaggcctgggactcacctttcagattagtggtctcccctctggcccagggcaggtccagaaatgctgcccaagagcctaggcctgcactcagagaccccaagtgtctgcctgttactctggccactgtggctgagctggtacctaaggtgcaaaacagagttgcctttactttttcctatgcttttctaaaagagaaggagtctttcattcaccatatccaacacagctggggatgtgctgagtcaaacctatagtcgacacatctcagagcccaaggtccacagcatactaccttgaaattactactggttattcagggcccaagggctctttagtcatcaggtaatgaatcctgccaggactatatccttcctttcagggcagtgagtttccttttggcccagcctttgtctgaaaatattgtctggactataggacctcatggctctggtgccctgttctactgaagctgagctgctatctaagttgcaagacaaagtcctctttaatctttgctcttttctccttaagcagaagaaagaagttattttgttgctgtgagctgcactgcctggggctggaggacaggtggcaaagccctcccttaatcgtgccagctggtgtctccctaggtcacatgccactctagtcctctggctctgagcctagaccagcacaaaaagttgcttaggaattgtagcccttgtgtcctagactgtctctcaagtttacctaggaccccagagtactttggcctgcagtgttaaggcttgtcaacaaattcaagttttgaccactggcatgggtgatacccttctggctaggtcaggtccagatgctccctctatgctcaggtgctggctgagcccagcacaacttttctctatgctatcatagggtagcactgagttcaatgtaaagtcccccagtcactgcattctccctctttcaagtgcacagtctctctgtgttggatggctggatggcctctgccggggatggagcaggggtagtgtcagtgattcaagactttctttcctaccctcttcagtgccttttctctgtgatatgaagttacaaccagatactgtgattgctcacatgaattttggttcttgtgacagtgcttttctgtgtgcagatagtttttaaaatgtggtattcctgcatgggggaagaatgatgaaagctcctattccaacattatgctctaccctccttcatttacttcttgatattgctttttttttaattggtgggaagcctaactcagtgttgagaataactattctgcttatttgctttgttaacaattatttcattactacgtagcccttaatgctaaaagaagattaatgatcccaacaagaaaaggagatttctagtattgtctctcaagttcggaccatttagaataggcttcatcttcaccaatgcacttcctataatgccaactctttaaactatatgttagtgtatgtcaggttactacatttatttttctaaatttcaaaacagtttcttggttaactgtatcactctatcagaaacaatagtaaatagttaaattggaaagtcaggtaacatatcaaaataatatggaacattttcagaattattgtgtagctttctttttttgagaaaatttctttcttggaaaaaatatattttggtttgaaaaaagcaatcaaagcaggcagacaggatgatcaaaacattagtcataaaagtaagtagtacaagaatttttaaatgtctgtggatttcccagaattgttatttatgatggagatgatatgatatgtgcaatttttcatcaaattttttaaagtctggggaagatcaaataagtttatttactgtacaaggcattggtttacttttgtcttagttcacctttaaatttatagtgttaatttttagaagatttttccaattagttacctgttaaagacataaacagccccatttttctttattagatccctgagaaggaatggaagagaagtgggtaatgagaattgatgtaaatgggcatatagtttctggtgttaaggatagctagaaaaaaaaaaaagtgggaattcaaagaggtttaccacataacaaacgtgatggctgccaaattttccaaatttttagttccgattttccataagaaatcagacagcactacacagatttaagggaatttagttataatattaactatttatatggggcctttgatcagtggttttcaaacacacttttggtaatagaactctgctaaaataaaccaatgaaagagatgaggctttggttgaagtggagtgaggcatctgtagtccaagcactagttcttttccttttcttcaggcctctgagacacctctgatgactttagagatgctgctacaatctggttcctccagagtattgattctaaatagggaaatcacatcaagtgatctgatataaattgctggagggatagtgtatgatatcagcataaaaatgtaagagaattctggtgattttgatttttttgtgtttagatttttcctgacttaatttacttttactgaattatagaaacttagtattgggaaattaaaaagaaataatcctttttccaaactttgttcttattgcattgtaatgaaaatagaaatagagtggacaagtgagataagctcagtcatttggagtctctttctctgacatttggatcatgagacgagtgaaacaagaatggaagaaaatgttggggttcattaaacttaggaactgtgtcctggcaattgaatagtttatcactgcacccccaacacatgagtgcaaaagtaattgcaatttttgcaatgttgaaatttgccgtttgatattggaacacattcttaaataaatgtggttatgttatacaccattttaatgcacattactcgctttattattataattatttttgctaatgacattacttgctgtttattttattttagactatggaaatgatgttagacaaaaagcaaatacgagcaattttcttattcaatttcttattcgagttcaaaatgggttgtaaggcagtggagacaaatcgcaacatcaacaacgcatttggcccaggaactgctaatgaacgtacagtggagtagtggtccaggaagttttgcaaagaagatgggagccttggagatgaggagcatagtggccagccattggaagttgacaacggccaactgagagcaatagtcgaagttgatcctcttacaactacatgaaaagttgctggaaaactcaatgttaaccattctactatcattcagcatttgaagcaaattggaaaggtgaaaaggctcgataagtgtgtgcctcatgagctgagtgaaatttaaatggtttaatgacttaatttaatttaatttaatttaatgattaaaatgattttttaaaaattattattttgaagtgtcgtcttcttttattctaggcaataacaatgaatcatttctctaccagattgtgatgtgcaatgaaaagtggattttataagacaaccgatgatgaccagctcagtggttggactgagaagaagctccaaagcagctcccaaagccaaacttgcaccaaaaaaaatggccatggtcactgtttggtggcctactgccagtctgatccactatagctttctgaatcccagcaagaccattacgtctgagaagtatgctcagcaaattgatgagatacaccaaaaactgcaatggttgcagctgtcattggtcaacagaaagtgttcaattcttctccaggacaattgccaaccacacgtcacacaaccactgcttcaaaagttgaatgaactgtgctgcgaagttttgtttcgtccaccatattcatctgacctcttgccaactgactaccacttcttcaagcatctcaacaactttttgcagggaaaacgcttccacaaccagcaggatgcagacaatgcttccgaagagtttgtctaatcccaacgtgcatatttttattctacagacgtaaacaaacttattcctccttggcaaaaatctgttgattgtaactcttgtcttagcttttgctaaggtttgaataattgtcctctccgaaattcacttaatcttcaacgtggcggcaatgaaatatggggcctttaagaggttattggatcatgaggactctgccctcatgaatgggttaatccatttatggattaatggattagtgggttaatggcttaatgggttatcatgggaggagaactggtggcttcatacaaaaagaaagacctcagttagcacgcaagcatgctctgctcctctgccatgtgttacactgcaccgcttcaagacaccacaagactgtctccaccagcaaaaaggctctcattagatgtggttcctcagccttgataacagtaagaaataaattcctttcattataaatacccactttcaggtgttttgttataagtacagaaaattaactaagacacttataaatttattccctcaggtttcctatgcgccttatgagctatctaacattaaataagcccttctgcgtggtcacaccgagccagcgcctgggcctggaaccaggccacagcccccaagcttcgcccaccacctcactaccatggacccccgcaaagtgaatgagctttgggcctttgtgaaaatgtgtaagcaggatccgagctaaatcagaagaaaataacaaggaagaaaaacctgatagtaagaaggtggaggaagacttaaaggcagacaaaccgtcaagtgaggaaagtgatctagaaattgataaagaaggtgcgattgaaccagacactcatgctcctcaagaaatgggagacgaaaatgcggagataatggaggagatgatggataaggcaaacaataaaaaactggctgctatcgaagccctaaatgatggtgaactccagaaagccattgacttattcacagatgccatcaagctgaatcctcacttggcccttttgtatgccaagagggccagtgtcttcgtcaaattacagaagccaaatactgccatccgagactgtgacagagccattgaaataaatcctgattcagctcagccttagaaatggcgggggaaagcacacagacttctaggccactgggaagaagcaacccatgatcttgcccttgcctgtaaattggattatgatgaagatgctagtgcaatgctgaaagaagttcaacctagggcacagaaaattgcagaacatcggagaaagtatgggtgaaaaagtgaagagcgagagatcaaagaaagaatagaatgagttaagaaggctcgagaagagcatgagagagcccagagggaggaagaagccagacgacagtcaggagctcagtatggctgttttccaggtggctttcctgggggaatgcctggtaattttcctggaggaatgcctggaatgggagggggcatgcctggaatggccggaatgcctggactcaatgaaattcttagtgatccagaggttcttgcagccatgcaggatccagaagttatggtggccttccaggatgtggctcagaacccagcaaatatgtcaaaataccagagcaacccaaaggttatgaatctcatcagtaaattgtcagccaaatttggaggtcaagcgtaatgcccttctgataaataatgcccttgctgaaggaaaagcaacctagatcaccttatggatgtcgcaataatacaaaccaatgtaccgctgtccttctcatcaagagagctggggtgctttgaagataatccctacccctctcccccaaatgcagctgaagcattttacagtggtttgccattagggtattcattcagataatgttttcctactaggaattacaaactttaaacactttttaaatcttcaaaatatttaaaacaaatttaaagggtctgttaattcttatattttttttactaatcattttggattttttttctttgaattattgggcagggaagatgcttatgtatgaaagattattgctctaatttgagtgaaataaaagttattattgcgaggcaaacataaaaaataaaaataaaaaaataaacaaaataccccaatacatattcatcctcaatagccatgaatgtgaaaatttgatattaaagggtgaagatttgcatgccagcattctcagagattgtggagagtctataaacataatattcgagatatctatatctaaggctttcttttaaattattccaataaaattatattctgagcactagcaaaacttgtagttagtaatcctatgcctctctgttcatgaataagtccttggttttgttaatcaatgatgtgggtaggatagtctttattttgatatcacgtcattcagtcactgatgtggtttggatctgtgtctccactctaatgtcaaattgtaatccccaatgttggaggtggagcctggtgatttgatcatgggagtggtttctcatgaatggtttaacacaatctcccttggtattgttgtcaggatagtgagttcttgtgagatctagctgtttaaaagtgtgtagcacctccctgctcattgtcttcctcctgcactggctatgtgaaatgttcactccccctctgctttccaccatgattgtaagttacctgaggcttccctagaagctgaggagatgccagcatcatggttcctatacagcttgcagaaccatgagccaattaaatgtcttttcattataaattatacagtatcaggtattttttataacactgtgagaacagaccaatacaatcacacattgaattatgtagaccacactctcaaagaccattgaaatacacaccttcattcattttagatcctacctactaatgctctagtttggataaggatgtcagacactatatttgtttctcttagaaccccgagcatccctcccaggtgctgacttttcacattattcagaattttcttcctcaggctcatgccaacatgaatgtaacacagatccgtaataactcaatggaaggcctcaaccactctgtcaatagaatagcttatcaccattctccctaaagtatcccatgggctgtttgaatgtagcatgatgggaacccatacacagaagtctattttataacagaacaggagataaacagcccacagtgataaaatgtaaccaaaggctgtatttctgtagaactgagagagaaagacaactagtagataaacctataatttcacctatgtctgtttaatgtacagttatatgctattaaattaaacaactctagctttcttgataccacttatcacatgaattataagtaagacacatgtattttgcaatatagacctcattctctgttacatgaaaataaggaaggttgtttctttgacccaatgtctgtaaaacttctctgtagctggctcttttccacaatcagtttggatagtgggtttgaaatagtcgtatgttacaaagacaaaaacaaacattttggaatgtttgcatgaattgtacttgtttgctaaattcaatttctacaatttacttaaggtttaataataaaataaaataaaggctatttcccttgggaagttgaaaatcctggggtttgcacgagcattttatggcaggaaaagtgggtatgaaaatattagactcataattaatccttattaaaatgtaataattgccacatttgttcaaataagtggaaagaactatagaaattcagaaatcagacagatgaaggaaattttacacacacacacacacacacacacaccccacacacacagaagaggaattgtatggaggaaacatgataattcacgtgtatcattgtctctaacaaaagtgtaattaattaaacaagaagaaactgtgactcaagataaaggaaattgattaggttgtgaagttttttgttttttctatgggctatatctattccttttttgttgcacgtaaatgaaagactgcctccctctcattcatcagaagagggtctctgtaagtgaaaaaacacatgtatcaattatttttaaaatcataaattgcataattatataatagcaattgctaatgcaaagttatgccatagcataataaataaattacacaaatcacaattttcacctttcattagagagatataatttttctattaaaaataagggtcgatccttaaggtttcaaagattaaattgggtctgaactgaactcccatgaacaattaaagttactatactacatgaattttattgtcttttggttgaatacattttttgacttggggtttcaatttattttctcaatttaaaaaacaaatctaggattaattagatttgtacagaaatgtactctgatatttacctacattgcaatactgagaattgcatcaacatttcgtgcagctgctcctctcagaaacaggcagtatatgctagcttcttgctaaatatgccacatgttttccttaaccatttagggttagttgtaaacaatagtaagctgttatcactaatatgttttttattttaaaagtcataccatatatcacttagtaactgggagaaataaaatatgcaaagattacttgaatcttttatgacactattcctttagatgtataaaataatctgaattctagaatcagttattggaaatagataagaaaataagtagaaaacaaagtcatcagtattagtgagcaactctatctagttagagaaacacaacaagcatgaaaagatatttgccagtaatgagaatgaattctgaggtagagctactaaacattccttcagttcagctgtgcatagttgctgaattcagagccatgccctctttctacagatagtctgaaaaatattcttattcaaggtggcgtagattcgtattaaagggctacactcttaggtgctgaagggtgaagtgctttgaagtgaaagaataatcttttataatccaaagaaaaatcgacacaatcagaaaatccagctctattccataatttctggtacctccatgctttccttgtctatttttcactgaattatcctttgcagttagaacacttgcaggttcatacataatatagtcaccccacattacattatttcaggtaacaagggaccacatatataaacagtggtccaataagattataatactgtatttttactgtaacttttctgtgtttaggtatgtttagatatataaatatttaccattgtgttacaattacctacaatactcaatactggaacatgctgcacaggtttgtagcctaggtgcaacagctatacgttatagcctgtatgtgtagcaggctatatcataaaggcttgtgtaagtatgctctatggtgttcacacagtgacaaaattgcctaaaggcacaattatcagaacatatccctgacattaagcaatgcatgactgtacttccaaaatatgtgttgaaatgcttttataatttctgttcctttcatttttcttttcaacttttctccttgtattctttaagttacatgttctcttaaaatacaatattctcctttactcttgtccagtttctactgtaattttttttcaatatttttaaaaactaggcatagtttatatttagtgtgctggctaagggtatagactctggagatgaaatatttggatttgaatcccagctacaccaccattggttgtgtgactttggacaagttacttaatctttgtctacaattgtttcttcattttccaaacagaaacaataataacacctacctaataaagttaatatgaggactaaattagttaatatatgtataacactgcgaatggtgcctatatacagtaaacactatttaagtgatagaaataacaatagtagttacttcttattatttttatggtgatgtcttaatttgttagtcttcactgactttttatagtaacatatcttttaatccttaaaaaatgaacctcatattattaggatttcaacaaaaaagttctttttttcattggtctcaaatttatttcgggtgttcttttgacagacatgtagacatttcatttaattgctctagataataatacattctgtttaggtagccaaattgatttctaaaactctttggataaaaggtccacaagatttttgtgcctccaaaggagttttacttctattcccaaggtcagtcttccacaacatggagagacattaccatagtccctccccttacttccttttattccaaagattctgcctgcgatgtaagctaggcttttgatgtctatgttaaggcttctccagaaagacagaaccaataggatagatagatgatagatagatagatagatagatatagatagatagatagatagatagatagatgagagatttatttatttatttatttatttattttgagacggaatctcactctgctgcccaggctggggtacagtggtgccatctctgctgactgcaagctccgcctcccgggttcatgccattctcctgcctcagcctcccgagtagctgggactacaggtgcccaccaccatgcccagctaattttttgtattttttttttttagtagagacggagttccaccgtgttagccacgatggtctcgatctcctgacctcgtgatccacccacctcagcatcccaaagtgctgggattacaggcgtgagctaccgcacccagccgatgagagatttattagtagaattgactcatgtaattatggaggctgagaagtcctacagtagtctgtttgcaagctggagaccctgggatgctaatagcgtgactctgtccaaatgtgaaaacctcagaaccagaaaagctgttggtgtaattctcagtacaagaccaaaggcctgggaaactgggtggcccctggtttacgttctggagtagaaagcccagagagcctggagttccgatgtccaagggaaggagaagaagagtcccagctatggcagtctcgtctggaaactctctcacaaactcacccagcagtaacattttaccacttctctaggtattccttaatccaatcgtgttgacacagttctgtagactgcacaagaagcatagtgctggtgtctgcttctggtgggggtcttaaagagcttataatcatggcagaaggcaaagggagagcaagcatgtcatatggcaagaaaggcaaaaaacatttcttatacaaaatacctattattttctcatctgaggttgtctggcaaactttgacataatcaatttcttatatgaacagttatatatttttaaagtcattgccgatatggccatagaactttggtcaaatgatgccaaagcatgtcacaaaacaaattattgtgctatgtattaaagtatcaaagatgtgatctgagcaggttttattagctggaggtgccagttagaatcaaattaaggtacttttacaaactgtatactcctgggcccattcttcagacattctaatgtggatatttattgtataagcctttgccatatttgctctggtgccatctccatttgaggtatatatttttaaatttaaataatttttaattgttatgagcacatattaggtgtatatatttatgtggtacatgagatattttgatgcagatgttcaatgcataataattgcatcagagtaagtggagaatttatcatctcaagcattcatcatttatttgtgttacaaacattccaattatactcttatagttactttaaaatatgcagtaaagtattgttgactacagttaccctgttatggtatcaactgctagatcttattgattcgatctaaatatattttcatacctattaaccaaccccactttcctcccacttctcagcctctggtaaccattattccactatctccaagagttcaattgtttcaagttttatctcccacaaatgaatgagagcatgaaaagtttgtctttctatgcctcacttatttcacttaacataatgtctggcttccactttcataaatgttgttgcaaataacagaatcttattttttctatggctgaagagtactccattttgtatatgtgccacctttttgtcatccattcatttgttgataaacaggttgattcaaaattctactaactgtgaatagtgctacaataaacatgggagtacagagatctctttgatatgctgatctccttttttggggtatatacttagcagtgggattgctagatcatatggcagttctatttttagttttataaggaacctgaaatgttctacatggtggctgtactaattcacattcccaccaacagtgtaccaaccaccaggtttcccctttctccacatcctcaccagcatttgttattacctctctattgaatataagccattttgactggggtgagatgatattgcagttttgatttgcatttctccgttgatcaatgatgttaatgtttgccattttatgtcttattttgaaaaacatctattcaaatattttgcccatttttaatcacgattagattttttcctgtagagttgttcaagttccttacatattctagttattaatcccttgtcaggtaggtagtttgaaaatattttcttccattctatgagctgtttaaactttgtttattgtttcctttgctgtgcagaaactttttaacttgatgtgatcctcttgttttatgttttgatttattgctttttatcttttgtgtatcccttgtaggtttttgacttaagattgccatgaggcttgcaaataacttcttataacccattattttaaagttatgacaacttagcatggcttgcaaaaacaaatttatgaacaagaaaagagaaaactaatacaaattctacaattaacttaatccccccagcttttttactttttgtttatgtttatatctgtttatactatgtcttgaacgtcattgttattacttttgatagattcatcatttagtctttctcctcaagataggagcagtttacacagtgcaattacagaggtaaatattctgttttggtctgtgtacttactattatcagtgagtcttttaccttcagattatttcttacttgcttgttaatgtccttttgtttcagattgaataatttcctttagaatttcttgtaggacaggtcttccattattgaaatcactcagcattttttgtgggtctgggaaagtctgtatttcctcatgtttgaagtatatttttgctggatatactattctatgataagcatttgtttttcttcagtcatttaaaaatgtcatatcactctgctctggcttataagattttcaatgaaagtcagttgctggaagtattgtatctttgttttatgtatgtttttgctgtttcttttctgtttctgctttctggatccgttctgtatccttgaccttgatagtgtgattatcagatgtctcaaggtagtcttatttaggttaaatccacttggtggcctataagcttcttgtatttgaatatttgtatctttctctaaatttggaatgttctttgttatgatccctttgaataactttctatcacaatctctgtctctctatctcctctttacatccaaaaactcttagatttgcccttttgaggttattttctagattgtgttggtgtacattattatatttttcttttgtatcctctgactgtatattttcaagtagcatgtcttcaagatcactcattctttttctgctcgatcagttctgctgttgggatactctgatgcattcttcactatatcaattgcattttcaagctccagaatttctgcttaaaataatttaaaaaaattatttcaatctctttgttaaattgtatataatagtattctcaattccttctctttgttataatgaatttcattaggcttcctcaaaacagctattttaaattttctgtctgaaaggtcacatatctctatcactccaggattcctcactggtgccttatttagtttgcttggtgaggtcatgttttcctagacggtcttgatgcttgcagatatttcttgacatccggacactgaagaattaggtatttattatagttttcacagtctgggcttatttgtacctttccttcttgtgaaggtgttccgggtactcaaaggaaattgagtgttgtgatctaagtcttcagtgtctgcagccatatctacattagaaggcactcacagccagtatcgctgactcttgcagactcctagaggtactgccttgatgaccttgggtaagatctgagagaattctctcgatcactaggcagagacccttattctcttcccttactttcccccaaacaaatagaatgtctctctctgtgctgagcttcctggagatggggaggggtgacacaagcacccttgtgccaccagcactaggactgcactgggtcagacttgaagccagcacagcactggggctaaccctaggccaatggtgaccactgtctgactaccacaaatgttcacttaaggcccaatagctcttcagccagaaggtaatgaatctagccatgcttgtgttcttctcttcagggtagcaagctagccacagcctgccctgccccgcccccacccctcaaagaataagtccagaaatgccatctggtagccaaggcccagagccaggaaacttaggaaactcttcatgctctgttattctgtggctgacctagcacccaaaccacaagacaaaatcttttccactcttcttcctcttttcctcaagcagaaggagactatccccatgaccagtactgccccaggcccacagcaagtactgcttttctaccactgatgttcactcatggtctacggacccttcagttagcttgtagcaaatgctgccaggcctgggtctctcccttcggggcaatgggatcccttctaatcagggtgagtccagaaatgctttctagaagccaaggcctgaaatcaggcagcccagaagcccactttgtgttctattttactacggctgagctagtacctaaactgcaagataaagtctcctttactcttccctctcctttactcaagcagaaggagtcttgttccatagccaccacaactgggaatatgctgggtcataccagaagtcagcacagccctggggctcacccaaggcccatggtcctacctgactaccactgatgtttattcaaagcccaagggcactttagtcagcaggtgatggatcctgccagaagtgggtccctccctctaaagcagtaggttcccttcttgtctagcaggtgcctagaaatgtcatctgggagataaggcctgaagtgtgggtctcaggatgctgcttagtgccttattctattgtggatgagctggtatctaagttgcaagacaaagtcccctttactctcccttctcctctcctcaagcaaaaggaaggagtcactccagaaattgcaagctggggttgtgggtatggtaatgtaagcactcccttggccactcaggctagtgtctcactaggtcatgtaaacctcatgtcaattagctctgagcccaccacagtaccaggacttgcccaggaattgcagtccttgtggcatagactactttttaagtttatttagaaccccagagcactttagtctgtagtggaggggctagccagaactcaggttctgaccactgggatggatgattcttttctagctagggctggtctaaatgctcacaatctgttcattttgttctccctcccccaagcacacagattttctctctgtgccatgcagctcctgctagaggaagggagaggagtgatgttgtcacttcaagactgtcttttctaccttcttcagcacctcttttcttgctatgatgttaaagttaggtaccgtgagcactcacctcatttttgcttcttatgaaggtgatttcttgtgtaaatagttgttcaagttgatgtttctgtggtggggacaattgctggtgggttctatttgaccacctcattccat

SEQ ID NO: 78 - DNA, 1512 bp, Homo sapiens
taagcccttctgcgtggtcacaccgagccagcgcctgggcctggaaccaggccacagcccccaagcttcgcccaccacctcactaccatggacccccgcaaagtgaatgagctttgggcctttgtgaaaatgtgtaagcaggatccgagctaaatcagaagaaaataacaaggaagaaaaacctgatagtaagaaggtggaggaagacttaaaggcagacaaaccgtcaagtgaggaaagtgatctagaaattgataaagaaggtgcgattgaaccagacactcatgctcctcaagaaatgggagacgaaaatgcggagataatggaggagatgatggataaggcaaacaataaaaaactggctgctatcgaagccctaaatgatggtgaactccagaaagccattgacttattcacagatgccatcaagctgaatcctcacttggcccttttgtatgccaagagggccagtgtcttcgtcaaattacagaagccaaatactgccatccgagactgtgacagagccattgaaataaatcctgattcagctcagccttagaaatggcgggggaaagcacacagacttctaggccactgggaagaagcaacccatgatcttgcccttgcctgtaaattggattatgatgaagatgctagtgcaatgctgaaagaagttcaacctagggcacagaaaattgcagaacatcggagaaagtatgggtgaaaaagtgaagagcgagagatcaaagaaagaatagaatgagttaagaaggctcgagaagagcatgagagagcccagagggaggaagaagccagacgacagtcaggagctcagtatggctgttttccaggtggctttcctgggggaatgcctggtaattttcctggaggaatgcctggaatggccggaatgcctggactcaatgaaattcttagtgatccagaggttcttgcagccatgcaggatccagaagttatggtggccttccaggatgtggctcagaacccagcaaatatgtcaaaataccagagcaacccaaaggttatgaatctcatcagtaaattgtcagccaaatttggaggtcaagcgtaatgcccttctgataaataatgcccttgctgaaggaaaagcaacctagatcaccttatggatgtcgcaataatacaaaccaatgtaccgctgtccttctcatcaagagagctggggtgctttgaagataatccctacccctctcccccaaatgcagctgaagcattttacagtggtttgccattagggtattcattcagataatgttttcctactaggaattacaaactttaaacactttttaaatcttcaaaatatttaaaacaaatttaaagggtctgttaattcttatattttttttactaatcattttggattttttttctttgaattattgggcagggaagatgcttatgtatgaaagattattgctctaatttgagtgaaataaaagttattattgcgaggcaaacataaaaaat

SEQ ID NO: 79 - protein, 87 aa, Homo sapiens
MREPRGRKKPDDSQELSMAVFQVAFLGECLVIFLEECLEWPECLDSMKFLVIQRFLQPCRIQKLWWPSRMWLRTQQICQNTRATQRL

SEQ ID NO: 80 - DNA, 1471 bp, Homo sapiens
cccttctgcgtggtcacaccgagccagcgcctgggcctggaaccaggccacagcccccaagcttcgcccaccacctcactaccatggacccccgcaaagtgaatgagctttgggcctttgtgaaaatgtgtaagcaggatccgagctaaatcagaagaaaataacaaggaagaaaaacctgatagtaagaaggtggaggaagacttaaaggcagacaaaccgtcaagtgaggaaagtgatctagaaattgataaagaaggtgcgattgaaccagacactcatgctcctcaagaaatgggagacgaaaatgcggagataatggaggagatgatggataaggcaaacaataaaaaactggctgctatcgaagccctaaatgatggtgaactccagaaagccattgacttattcacagatgccatcaagctgaatcctcacttggcccttttgtatgccaagagggccagtgtcttcgtcaaattacagaagccaaatactgccatccgagactgtgacagagccattgaaataaatcctgattcagctcagccttagaaatggcgggggaaagcacacagacttctaggccactgggaagaagcaacccatgatcttgcccttgcctgtaaattggattatgatgaagatgctagtgcaatgctgaaagaagttcaacctagggcacagaaaattgcagaacatcggagaaagtatgggtgaaaaagtgaagagcgagagatcaaagaaagaatagaatgagttaagaaggctcgagaagagcatgagagagcccagagggaggaagaagccagacgacagtcaggagctcagtatggctgttttccaggtggctttcctgggggaatgcctggtaattttcctggaggaatgcctggaatgggagggggcatgcctggaatggccggaatgcctggactcaatgaaattcttagtgatccagaggttcttgcagccatgcaggatccagaagttatggtggccttccaggatgtggctcagaacccagcaaatatgtcaaaataccagagcaacccaaaggttatgaatctcatcagtaaattgtcagccaaatttggaggtcaagcgtaatgcccttctgataaataatgcccttgctgaaggaaaagcaacctagatcaccttatggatgtcgcaataatacaaaccaatgtaccgctgtccttctcatcaagagagctggggtgctttgaagataatccctacccctctcccccaaatgcagctgaagcattttacagtggtttgccattagggtattcattcagataatgttttcctactaggaattacaaactttaaacatatttaaaacaaatttaaagggtctgttaattcttatattttttttactaatcattttggattttttttctttgaattattgggcagggaagatgcttatgtatgaaagattattgctctaatttga

SEQ ID NO: 81 - protein, 94 aa, Homo sapiens
MREPRGRKKPDDSQELSMAVFQVAFLGECLVIFLEECLEWEGACLEWPECLDSMKFLVIQRFLQPCRIQKLWWPSRMWLRTQQICQNTRATQRL

SEQ ID NO: 82 - DNA, 1529 bp, Homo sapiens
cccttctgcgtggtcacaccgagccagcgcctgggcctggaaccaggccacagcccccaagcttcgcccaccacctcactaccatggacccccgcaaagtgaatgagctttgggcctttgtgaaaatgtgtaagcaggatccgagctaaatcagaagaaaataacaaggaagaaaaacctgatagtaagaaggtggaggaagacttaaaggcagacaaaccgtcaagtgaggaaagtgatctagaaattgataaagaaggtgcgattgaaccagacactcatgctcctcaagaaatgggagacgaaaatgcggagataatggaggagatgatggataaggcaaacaataaaaaactggctgctatcgaagccctaaatgatggtgaactccagaaagccattgacttattcacagatgccatcaagctgaatcctcacttggcccttttgtatgccaagagggccagtgtcttcgtcaaattacagaagccaaatactgccatccgagactgtgacagagccattgaaataaatcctgattcagctcagccttagaaatggcgggggaaagcacacagacttctaggccactgggaagaagcaacccatgatcttgcccttgcctgtaaattggattatgatgaagatgctagtgcaatgctgaaagaagttcaacctagggcacagaaaattgcagaacatcggagaaagtatgggtgaaaaagtgaagagcgagagatcaaagaaagaatagaatgagttaagaaggctcgagaagagcatgagagagcccagagggaggaagaagccagacgacagtcaggagctcagtatggctgttttccaggtggctttcctgggggaatgcctggtaattttcctggaggaatgcctggaatgggagggggcatgcctggaatggccggaatgcctggactcaatgaaattcttagtgatccagaggttcttgcagccatgcaggatccagaagttatggtggccttccaggatgtggctcagaacccagcaaatatgtcaaaataccagagcaacccaaaggttatgaatctcatcagtaaattgtcagccaaatttggaggtcaagcgtaatgcccttctgataaataatgcccttgctgaaggaaaagcaacctagatcaccttatggatgtcgcaataatacaaaccaatgtaccgctgtccttctcatcaagagagctggggtgctttgaagataatccctacccctctcccccaaatgcagctgaagcattttacagtggtttgccattagggtattcattcagataatgttttcctactaggaattacaaactttaaacactttttaaatcttcaaaatatttaaaacaaatttaaagggtctgttaattcttatattttttttactaatcattttggattttttttctttgaattattgggcagggaagatgcttatgtatgaaagattattgctctaatttgagtgaaataaaagttattattgcgaggcaaacataaaaaat

SEQ ID NO: 83 - protein, 94 aa, Homo sapiens; identical to SEQ ID NO: 81

SEQ ID NO: 84 - DNA, 115059 bp, Mus musculus
  misc_feature (1)...(115059): n = A,T,C or G
ctggctttctctcttcccctccccctcccttccccagcccgaggggtcctgaggtgacagcgcctggaagtgggactggaggagccggcggaggagaagatggacagggccaggcctgggcgtcggcgagcttcatcaggtgaggagagccggcgcgagggccgagccgaccattgtacctgcgcggctggcggcggctccgcgggcgcggtggggagggagagagggagggagagaggaagggagagagggagggagagaggannnnnnnnnnnnnnnnnnnnnnnnnnnnnnnnnnnnnnnnnnnnnnnnnnnnnnnnnnnnnnnnnnnnnnnnnnnnnnnnnnnnnnnnnncctcggccgcctgccccttctgcacccctttggtatgctccctcctcccgggacacgctccttgattgtcttcggtccagcggtcttctctgctggctatagccgctgtcctgccacgccttcctcgcaattgcacccgcgttcactttcgctcccaccttccccgcacaagatgtcactctcctttctgatcctttgacccctcgcctggccggcttccctccttcctttggcagatcagagaagctgcaagcgaggaaggcggggcttgtcggtcgccccgcagcgcctcgagtaaataaaatactcctgctgtccctctcgtccgacaggctcgtttaatagcgtttttcttttccagcctccagcatcttccaaaagtgattcgaaagtcaaaggatttgaagccgggttttttgttgttgttgtgtttttgtttttgtttttttatctcagcccattttttggaattgttttaagacttgaaactcaagaacctcttttaagttttgtataaaattgagatagagctccgccccgtcgacaagttattgttatccatctcatctgttaagtgcacctcttaattcctggagtcagctcccgtgtgcatagaaatgcactgtctagtacataaaacagtgtcgatgaattcattgagttgtttttgttttcttttctttttctgtttttgagaaaaggtctccctgtgtaactcaagatggggtcatattcctattccccctgattacctcttctgaatggtggggttacaggcgacccccccccactttttcctctttctgtttttttgagacagagtttctctgtgtactcctggctatcctggaactcaatttgtagacctggctggcctcccaactcagagatatgcctgcttttgcctcccatgtcctggggtgttaaaggcttgcaccactaccaactgagctcaacccattgtaaactttctcattatacggtttattttggtagagttagactcagcagttccaaatctatttaggtatgcccggtggcaatgtgtctaaagctcttaaggctatgagcacagatctctgaggactcggtttgacagagttgaactcccaagatctcttcatatgcaatcaattttatcaatatttttgtctttttttttttttttttgaggaatggtcgtcctcttgcagccttggagctcaggggtctcctgcgtcagacttttcccgtgctaggattttaggtgtgttgctaccacgcctagccttttcccactgcgtattttaaagatactagctgttctttgcctttgaaatcatatttatgcaagacataaaggtgtttttatatgcatgtctctactgatgagtttttgttttaatattcctgctccctggggtcaagtaaaattgacatactagaaaaatgcagtatctagtatcatttgggagtttttggatggagaacttcaggtgtgatcataatctcagtttaagatgcacagttccttcttaataaatacgttccatctcagcttggtgcatttatacgtgttagtgtgttatattaagatattagccttttctatccgttggcagaatctgtgcccctcacccggttatattcacttattatagtttatttgatggatatgctttttagaaatatgcttttttgaagggctggagagatggctcagtggttaagagcactgactgctcatctgaaggtcctgagttcaattcccagcaaccacatggtggctcacgaccacctgtaatggaatctgatgccctcttctggggtgtctgaaaacagctacagtgtactttcatataacaaataaagaaatctttaaaaacaaaaaacaaacaaaaaaggaactttgagagttaaaaagtggttggtctgaaaacacacagttatttatgttaactatatcgctgggaaagatctttttgggtgaattttgagattaagaccccggattcataaaaattgttggtgttcgtgtagagaattttttttttttcatgactctcctttggaaatggcctttctgcagaggatgtgttatcagaaccattcagaaatctagttttctagctccccccagtatgcttctagttgtgtaatatgaacattaaggaaattacttaatagtatatttgacttttcacatagatattaacagaagtatgctgtcctggcacttgttctgcagaacaggatggtctcacgctcagagatctgcccgcctttgcctcctggacactcagaataaaggagtgcgccaccatccccatcttcaaatattttagttttgatttatatatttgattttatgtctatgagtatttttcctgcatgcacacatgtgaaccatgcatgctcctggtgcttgtggtgatcaggagaggacatcagagcctttggaactggactatagttgtgagccgccatgttggtgctggcaatcaaacctatgccctgtgcatgagcagttagtgtacttaactgctgagccatggctcctgtccctggaaacagtttgtagcatagtaatatcacctccttttagcatgacccagttgttttcttttttttcttttcttttttttttttttggtatttgagatggggtttctctgtgtagccctggctgtcctggaactcactctgtagaccaggctggctttggactcagaaatcctcctgcctctgcctcccaaatcctgggattaagggcgtgcgccaccactgtccggccccgttgttttcttgactttgttttagagtaaatctcttcttcatcacctgagattcatgtactcatcaaaaccagtggtccaacactgtcttcctcttcacgtactcaccgagctcagctctgagatcttgtttgcaagtgtctgaagatgacattgctggactgcaccttctgcactcttggcctgacaaactttcattctttcaaaaaccctttcaagtgacctattatttttgatttatggatgaaactaggatttaagagtcataagcatctgtagtaagagctagtgttagaaacaggaccaggattaaaattctggtcctaaatacagtatctatatctttaatatcttttactgccattttatgttaattttccatactttgtggaaaaaaagagttacatggctaaaaaataactagtttgggtttaaaaccaaaaaccaaactaccttcagggtttctaaattctttgtgtgctcttgtgcattgtggctcatgaagaaagtggctttcaagcgagggtagcggagaggggctgaaaggaggagaggaaggggagaaatggatataattccatttaaattaaaaacataaaaaagaaagaaattggctgtgaggactggtagatggtaggtgggtaaaggtgcttcctgacgaaacggatacaagaattcacttggtggtgagagagagacaactgagcattgtcttccgacctccacatgagccctgcaatatgtatgaatcctccagcccccaataaataaatggaaatgtagctgagtgcatcctgatttcttcttgagggcttagtgtcctattatatattttcctaacatgcatcagttggtccaggtgatatctgtttgtagtattagaagtataatgtgacctggaccagcaagttgttctttagtgcctggatcctaagggcgataaccaggggatgagaagataagatagggaagcagggatcaggtcttacacaagctatttcttaatgccaaacaagtttatcaagaagtacagcatcttacatacagtttgtaggggaaaatggcagagtcagcagaaaactatcataatgggacagtttgcaagaaactaatcaagcaatttttcacaaagagaacacaagatatctcaagttcatcacagaccaagtgctcactggctttggaagggaaaagttgggttctcaggatctggaaaacagcagctcctccaaggccctggccattactggccttgcagagcatgtacctgttatagatgagggactaagttccttctctgtgcatcaggacctcagggaaagtcctgcactggcctcttcctcaaaagtaatggactacaattaaattcaaattaaaaagctgcaactaattatggtgaatctgtattcttttccaagacgatacctaaggcagttgaagtaagtaggattgtccagagaaagtgtaaagagttaggcatggtggcacacgtctttaattccagcaccatgtgacttcaaagccagcctgttctatatagcaagttctaggccagctaggcctacattagagagaaacccaaacaaacaaacaaacaaacatacaaaccaaaaaaaaaagcaaaagcaaacaacccaaaacaacaacaacaacaaaaaaccccaaaacaaaacaaggtcagataatttgcaaatggagaaaatagacattggcaagcaggtaaactaggagtagggttaggaggagagtggaatgttagcatttcagagaaagtcatgtaagggatttgcccatagaggttacttttcctggtgaatgtggtccaacagcaataggagaaggcagatttgaagagcctgaaggagctaagggatgggaggaggtaggccacaggaataagctgagaaagtgagaggaggggaagtacacagttggagtagggagtcagggctagaaagaaaagactaggaaaggtcagcggagaagatgatggttaacgatgtatcaggcaaactgtagttagggtgaggtgctgggagaggggcatggaggagatttgatgacggggaaagtgggaggaagacaaatccagatacagtttgagaagttactattgcagtcatggcttgtggtgaaataggtgaggtattatgaaaatggagttttagaaatctgagctcaagaataggaggttatgttgggttgaataaaggacgtaactaatttcagagttttaaatgtgagtttgcagccagccatggtggtgcacactttgatcccagcactggggaggcagaggcaggcaggttctgagctcgaggccagcctggtctgcagagcgaatttcaggacagccagggctatatagggaaaccctttcttgagaagaaaaagaaatgtgagttttcgggggttggggatactaaagttgataatgaatctaatgatactaagcagaaggaggaagcagaagaataagtttagtttaacgtagggtaaagtgatgtgacaggaggtggaatcaagggaagggttcagggccaaggacatcatgtggaatgagaggtttctatttcagaagttgggtaaagctgggtgtggtggcacacacgtttaatcccagaacctgggaggcagaggcaggtggatctcttaagttcaaatctacaacatccttcggaagactagtgtagctgtaggcttctgtaatcctagcgcttgtggtggatagagactgaagggtagtgggcccattggctgctggctgaacctggaggttcagtgaaggagaccttgtttctagtaaggcagcgattgatacgcagaacacctgatgtcttctgttttccctacatactcagagatgtgcagcttgcatatgtacctgcctgattgcaccctacatgtccattacatacatgtactcaaacatacaaacaaaagattgcttctccatcatttattgtgacaaaaattttcttgccaaattatagtaatatgccacaagtagatgtcttggtgttatgtatatacatatgcatatgtatgcagtttttattatgaagtctgctatataatttggtaggttacagttatttatttatttatttatttatttatttattgaataggatcttaccattagctttggctgtctgggaacttggtatgtagaccaccaggctggccttgaaatcacagaaacccacatggctcttccttctgagtgctaggattaaaggcgtgctcattatacccgagatgagtggcacatgatagtattaagcaaattatttgctgattgagagaattcatataagtaaaacccacaggaagtctgaaaacactgatgagtaaagagttaaagtgtttccatttatgcagcgttgtgtggctttgtgtgtgtgtgtgtgtgtgtgtgtgtgtgtgtgtgtgtgtgtgtaagagagagaaaggaaatctttttgtagaatactgccaacttctagataatgtcacctctgctctctatcacgagcatttgcccaatcatctgattctaccatgggtatgaggaaatttctgtttagttcttctaaattatcctcatgctggagacttttgtgactgtctgttacactgacacatgacagattttttggtctttaggcatagccctttaggatctacagaacatatcagtgtattataagcataacaaacaattttaaatacgtggtatatataaaaggatcctgttcattaaattctgtcatttagatattaagtaatgatttttattacgtctttcatttttgtagagattgttacagagggaaaacggaaaaagtcatcaccagctgatttacagaaggtatgtgttcatgtgttcatgtcttcaaagttactgataccaataccattgtgctagtctcattttagtgtaattacagtatactgtaaaactttagtcagtgttttaggtaaaattctgtgttctgactaactgaggttggaacacggaactttatgagacttaagttattacatggtaatcagtataccttccagtgctcattttagattttatataaagcatagttcagtgtttctttggtgaatgaatgccatgtctaatgttcatttattaataatttagatttagaagagttatattcctgatataactgaaaatgataccttgtttttgtttagtttaggttttttaactaaccaattaattaattaatttttatgtgtatgggtactttgcttctatgtatgtctgtgcatcacatacttgattggtgcctgcggaggctaaaggatggtgttggatctcttgggactagagttagagatggtgtgactgagccaccatgtgggtgctgggaattgaacctgagtcctctggaagggcagctggtgctcttagcctcctgtgagccacttctccagaccctgcacttccttgcctgtctgtctgtctgttttctttctttctttctttctttctttctttctttctttctttctttctttctttctttctttctttctctaaatttctttgtatttcctgtgcattggtattttgtttgcatgtatgtctgtgtgagggtgttgggtgggtcctcaggaataggaattatagacaggtgtgagctgctatatgggtgctgggaattgaacccaggtcctctggatgagcaggtagtgctctggaccactgggctatctctccagccctatgttttattttcttgaaacagcatttcatgtagcacagggtagccttgaacacactataaagctgaaaattattcttctgttctgccttctaagtactaggatcacctatatcaggatgtataattaaaaaaattatttacttattctgtataagacaaagctagcaagagcaattactaatttctacttatataacacgtttttaaagtcatcttttaaaaaaagtgaccccctagcattttgtgatttaaatgtaggaataacctgatttacataataaatattaattatttattagataaattttttctttcatgcacccttttattttgagacagggttttacaatgtagctctggctgttctcgaactgactatgtagaccaggttgcctcaaacccacagagatcagctgcctccagagtgctgaagttaagtcactcagtactatttctggctacatgtttagccttaatttagaacattctttgtgttaggcagttgtagcatttggcagaggagggtgatgggagggagtcaggagtgctttagagaaccatctaaagaatgttattttaggtatttgttttcattagttgacttaaaatttgcagggggtgctttctccatttaaagtgtttgatttagattaagttgggtgagcgatctaactgtctgtctgtctgtctatctatccatatatgtgtgtatgtatgtatgtgtgtgtgtgtgtgtattttaatattgctagatcagaaactgtcataaccagttcattttttgttactatatcaggatacccgagcctagtaatttgtaaagaaaagaagtgctgagccagtgagatagctcagtgagtaaaagaaaataaatgtattttgttcacggtattggagagccattggcatttgttcattttctcttgagagccttgttcagcttcagcttttgacagaaagtagaagagcaccaaaagaaaaaaaaaaaaaaagacacgcctttaatcccagcacttgggaggcagaggcaggcaaatttctgagttcgaggccagcctggtctacagagtgagttccaggacagccagggttacacagagaaaccctgtctcaaaaaaccaaaaaaaaaaaaaaaaaaaaagaaaatagaagagcaaacaggctgaagatgagctgagagagaataagttccagtagttctttgtaataatcgctttctctcttttccttcatcatcctcattatcgttactaatacgattttttaaagattttaaaaatttatttcatgtatgtgagtacactgtcgctgtcttcagacacaccagaaaagggcatcagatcccattacagatggttgtgagccaccatgtggttgctgggatttgaactcaggacctctggaagagcagtcagtacgcttaacagctgagccatctctccagccccattattttatttttttgattaagagtctcactgtgtaatcctgtctggcgtggaattctctatgtagattaggctggcctcaaattcacagagacagcctctgcctcccaaatgctaggattaaatttatttgacaccgcacctgatggaggagggtttcctgtgtccagaagtttgaggctagcctaggaaatatatccataatactaagttaatacatcattgtcagattctcttccctgagttccctgcctgttcctcctttaccctttctcggttttcacagtgttgaggatggaacccagggctttgaaaatgctgaggatatactttgccaccaaagccacaccccctttccatactctttaggatgacatttttattttcaaataacttgtgactcagaaaagttatagaaataggacagaattcctgtgtactatttgttcagtttattctgatgttaatatcttatataatgagagtatgaatgtcaaaaaataagaaattagccttgatctgatactttaacctatagatccattccaagattcttcatttcctttacttgttatacctttttaatttctgtgtctgattatcacatttctttagtattgttgcttttatagccatgacactttggaaaagaactagataatactttatagactattcttcaacctgaaaggatgtgtgtgtgtgtgtgtgtttggttaatgagaattttttctgtgaaagagagctgtcccttttccatttatttatatcaagttcttctcagatacttattctgtttattataatctactgttgatgattttgttggtcaaagttttgcagttttggcaatagggtatttttcagattggctcctgtgttcccttgtgtgtatatgtgtatgcatttgtatgtgtattcatttgtatgtgagtgcatgtgcggagaacatgtatgtgcatgtgtcaagggcatgtgcaggcatgcatgtggagggcagcctcaagtgtcctttctcctcctgctccccaactctcgacgcccccaacaggatctcttgctgttttggaatttgagaagtaggcaaggttgactgctcagtgaaccccagagatttgtggatttccacctctccagtgctaggattttaagtgtgagctaccacacacacacacacacacacacacacacacacacacacaaatacacatatttatatttattcatacacatatgtttaatgtgaattcttgggattgaattcaggtttctgtgcttttaaaaacagaagtagtgtactgagttgtatattttcctagccctcctgtagccttttaatatcatgctatttttttttcttgagtgctttctttttagcattataagatatgttttcggcagttcaggatgttaattttgttacttagcctgctgctgtgcatacttattagaggaacagtttaaagaaagaaaattttattttgcctcctggtttcagagattttaaacactgactggctttaggccatggcaaggcagaaacatggaggagggcatggagagcaaagctgttcacttcttggtaagcaggaagccgagaggaaagagatgcggtccagggccagaggagagtccttcaaaggcttgccccagtgagccacttctttactgggcttcactgtccacagtttctctgttttccagtcatctcttgagatttttctacccatcatttagttatggtatgggttgagtcagctttcatggtttagatctctggaaacaccctcacagacactcaggtgtgctttactgatcgcagtgcagtgcagtgcagtgcagtgcagtgcagtgcagtgcaggtgtctgttagtccagttgatcatcaagactatcatccatcacacttggatttgtttttaaaaattgaagaattacattcaggaagccagatctagatggagtgtacacttttggcactggagtgggtacattggttctagacattctcagtaggaagaactagaaaatacatacacacttgagcttcctccctcatctccctgtctgtacaaatattaaaatataagttcactattgagaattcagattccagtccaatactgatactcttattctagttttctcttttctcctttttaatattcttgtctattagcaatgctatactttctttttaaaatatttattaaatctttgagaattgtatgaaatcataggcctgcccatatttaaagggaaggaatatgattttgctgttttagggctgttggtatcacactataaggtaaccatgtggtgtgggcagtatagatacagagttcaaaataggcctattctttttttttttttttaagactttgtttattattatatgtaagtacactgtagctgtcttcagacactccagaagagggtgtcagatcccattacagatggttgtaagccaccatgtggttgctgggatttgaactcaggacctttggaagagcagtcagtgctcttaaccgccgagccatctctccagcccaaaataggcctattcttgagaaatacaatatgtataacctgtgtacgaaagggtccatggatttgaacagcctgaaacctttgtcttatttctctcatttcctaattggaaatatgaagtgctaggcctggtggaacctccctgcaatcccagctcctcaggaagctgaggcagaaacagagaacttaatccctgccggtgctacagagtgagttcagtttttacctaagtaacttggtaagacctaccttcaaattaataaattaacaaaaggggttgagataatggcttggtagtagagcaattgcatctcatgcaggaggccctgggtttggtccccaacagtatacaaaaattgaagtaatttaaagatactttttttttccgagtgaaaaattacaaagaaataccttctaaaggctggcaagatggctcagtgggtaagagcactgactgctcttctgaaggtcctgagttcaaatcccagcaaccacatggtgactcacaaccatccataatgagatctgacaccctcttctggtgtgtctggagtcagctacagtgtacttatgtataataataaagaaatctttggcttggagcaagcagggaccgagcgagtggggccgacaggagcgagcagacgtcctaaaaattcaattcccaacaaccacatgaaggctcacaaccatctgtacagctacaatgtactcacatacataaaataaataagtacctctttgaggaaaaaagaaatcccttttaatacagaaaagcaataaataggaagttactggtgctcaggaagattagctgttccttagagaagctggtgatgtgtgagtcaaggtatgctgccttcaaattcatcctgtcctcccaactcaggcttgcttacagaaacacgtgtgcactaaagcttatcgctgatattagtgcttttgaggaggagttggctggtcattgaggctggggctatgctccatgctaagcagctgctctgctactgagctggggctcccttctaaatgattagtgtatgctatttaatacttagttacatataagttttggataatttaagttttaaacaaatgatttctaacttgttatatttcatgcattcatttttaaaatttaggttattgtgagttatatatatcagagatacaaaagtcattaagtgggtgtagtggacagaagcctgtaatcccatcatatgggaggcagagacaggaggattgccacaagtttgcggccagcctggtcaactttgtaagttctcggatagctgggcaacacagaagggccttttctaaaggaaaaaagacaaaaaaagcaagaaaatgagtgaccgggaccctcagtttaggattatgcagcttgaagaagacagttgtatagacaaataactaggatatggtccgaggaatataaataatttaaaataaatgtactaggcactgacacaaagaaaggaatggcttcaaataaggccagatattattcagacacatttggagtatttcataaaaataaatgcagagaagagcaatctaggttgaaaaaatagtgtataaacatatctagcatatatataatatatataatgtaaacatatttagattatatatagtatatttagtatctatataaaacaatgcaacacatctgaagaaagtttaacaactccataatgttgagttgcagagttttaatctgtgggtgatgtgagccagccctgaatgtatggcattttacttataagtgacagcgtccttgtgtcattattgtattttgtatattacagttatgaaaagctttgtgttttatataatttagcttgcattagaaagattagagggtgaaaagatcagactagagaatagtattttggaagctagtgagattcgtttacttattttatgatcatcagaagatattacaactgtatttaatttcttgtaaattaagcatttaatttaaatctttaaaaactattagaatatttatgtagagtaatagacaatgcctctgttagttgattcaaatatatatatatatatttcagttaaactaattattttcttgtcctggtttcagataacaaagttgttaactgtaaagtcagaggatgttcttgctcagtcaccattgtccaaactcagaggctcagaatgctgggtaaattaacttttaaaatatattgttgtatttgatttgtttaaaatattttagtatataaatttttattttcctctgtcctttttaattttctatgtaattaaagatttaaaaatagcttatttctaatatgtgttaaaataaaacttggagattaggatcttgggtcttcagtttaaaatcgcttatgcatggttgacttatgaaatttaaatctcattataaaataaataattttaaggtaactaaaattttaggtttagtaaagttatttgttctcctcctcttcttcttcttcttcttcttcttcttcttcttcttcttcttcttcttcttcttcttcttctttttttttttttttaacaaaatcattatctcttaattggtactatagctacatttcaaaatgtaccgtggggactggaaagatggctcggtggctgaaagcactagtcattcttctagagggcttggggttagttcccagcacctacatgatggctcacaactgcttctcactccagttccaggggatccgatgccctcttcttacctctgcaagcatcaggcatgtacatggtatacagacatacatgaaacaaaatacccacatatatacataagtgtgtatgtatctacacacacacacacatatacacaaaatacctatatatacaagtatatgtatatatgtgtgtctgtgtgtgtgtatatatatatatatatatatatatatatatatattcagatacctaaaacccacatacacatatacatatacatcatacacatacaaataatgcatggatatttttatatattataaaacttagagaatgctttttaaaaagattatggttatgcatctagactttagtattatcacaattagttattagtgtcgggttctgataactccctgataacgagagttaccagtagtatcattttgttatttttgctgtttaagaggggtctggctatgttgcatagactgattttgaagttttgggctaaagagaatcctcctctcttagcatccttagtatctgggactatcgtcatgcactactgcacctggcacagcacttctttctgttttgagacagcctcacaaactagcccaggctggttttaaattcttaagcttcctgttttgcaaatactgctatcttactttctgtttttggtgtgtgcatatgtaccctgtgttaatgtgtgtatgggtatggatacacatgtgtgcagtggccagatgacagcttcattagctctttctttgtgtgtgtgtgttttaaaattaattgttttatttatttacatcctaaatgttgcccccttcctggtgccccctcccagagttcttcaccccatctcccctcccttttgcctctgagagggtgctccccaacccacccatctcagactcttcctcctccccgcatatcttttttccttttataagacaggatcattcactggtctgaaactcaccaagaaggttaggatggctgcttaggaacccctagggatctctggcaccagaattgcaaatatgtaccccacccctcttcctttaaaacctgggttctgggattgtttacaaagcaggctctttacctactgagctatctctcaagtccccttgccattctgtttaccctctgttcatggcaggatagcacttctcattccattcctttgtgggagccatttgtttggctcaattcagaaagaaagagctctagggactgtgggtgtgcttttccaagatgagctatcactcaaccctattttgaatagtaaaaatattttttcctctatgtgtgtgtccttctatggtggagcatgcaagtgcctagtgtgcatgtggaggtcagaggacaactttgtgggcgtctgctcttttcgtccactttaatgagggttctggattgacctgaggatgccaggctagtgtagcaagtgctgttactcacagagccatcacagcaggctgctttgccctcagttcagtcatttttctttatttttcaaaacaaggtctcattgtagctcagggtagcttagaactcaccatgtagcccaggctggcctagaacttacagtaatcatcttgcctcagactcctgaataataacctaaattatacatgtgagccacttagctcatttattaaaactacataaagattcatttctgccattaaaatggcatagggaagatctggatggctcagcacttaaaaatgtttactggtcttgtagcacctgagttcagttcctaccatccaacatcaggtggattacaaccccctatcagtgcagttccagggaatcttatgcctttgtcttccatgggcacctgcactaacatgaatgtagccccacagagacacataattaaaaataaaatttaaaaaatgtataggacacagagacacataattaaaaataaaattaaaaaaatgtatagggaggaaattgccatgtaagcttatatagctccttgattgatttagccttttatataaggacatctttaattcagggatatattgtatggtgagtgtattttcccacatacttttctttctcccttccactcttcctttagttctttttgtttccctatacagttaagctttcacatacatgattttgtgtatctatataaaaatcttggagtaaagataatacggataaaaatgaactatttttgtttttctaagattgacttaattttcttatgaatatctctagttgtatctattttgctgcaaattatataacttcactgactatgtctaaacaaaatgttttatatgtatatatacatgtatatatgtatacatacacacacacacacacacacacacacacacacacacacattttccttagctatttctctgtttttggccactgagattggttctataatttagctcttgtgaatagtgctgcagtaaatgttgatgtgcaaatatttctgtgatatgttgactttgggtcctttggtaaataccaacgaggtgtggtatatctgggtcacatggtagctctatgctcatttccattgctactagactaagtcttcctaccaccagaggttctcctatgtctatcttttttcttgcagttgttgctctctgtttgcctaattactgccattctgattaggctaaaatttcaatgagttttgatttgaattgatagctagtgactttgaacatttttttcatgtggctgttggccatttgtatttcatctctagagaaatttttaacttcacctcatttattgatggagttatttgattttttaaaagaaaacatttatttattttaggtgagtacaccgtcactgtcctcagacacatcaaaagaggacatcagatcctactacttatggttgtgagccaccatatggttgctgggaattgaactcagaacctctggaagagcagcagtcagtgctcttaacagctgattcatctcacctgcctgacttttttttttttttttttaaaagacaggatctcattgtgtagcctgggctggtctagaacttgatatgtggaccaagttgacctcaaaattacagagagctccctgcctctgcctcttgactactgggattaaagacatgtaccattctgcccagctgagttacttgatttcttgtttaatgttttcagttccttgtatattttagagttagatcctgttttacatatacagctagcaaagattttctcttattctagacagtatttacttgaataaaaatctctttggcattctgaacttcttattctctgccccgtgtcagttgtggacctctgtgtaatcaccacgtgctgtaaatagaagcttgtcagttgggtgtcatgataagtcattaggagttggtttaatactattcacattgaatagcataatggtagtaggttctccctggggacctatgacctctctagttcttggcctgataatggtgccaagtatggatttcaccttgtggaatgggatttaaattccattagaaagtggttggttgctcccaaaatgttcaccccactattgcactgggggtcatgtcttgacaggccaaatcattgtagcttatagagttcacagcgatgtaaggtttattgctacgctccagtgaccactgccaaggaattaaaatccaattcaagattcatcagaggccggatatggtggcatggacctttaatcccagaagccaggatgcggagtcaagcggatctcagagtttgagggcagcctgatttaaaaatgagtttcagtacagccagggctgttacgcagtgagaccctgtctcaatttagcaaaaccagagattccaaatgctgcttctccagaatgtactagcattctgtgcagcttttattccagatggcttaaagttcaaagcaggaacagagaaactgaaaatatacagactgggtctcatcactgtcgccaggtgtgctcagatacagaaggtatcatgtctgaatagggcatgtttgcatgatgtccctgaacatgctaagctgcattgatgaggaggggacaggagacatgttgtccttgacattccttgggcaggtagaggctttttcctccaaggggtttaaacaaagaaagttctctgggtacagagttcacacaacagggtagtgtaggaaagcctgtcatacggaggctgctaagattgaagattcctatttattccttctgatagtgcacatagcaccatccagcactgtgaaatctagccagtaagggatgaagcttccaggtcagtaacaggtattaccatcaagtactagagagtaaccgagagctacagcaatgcctataatgattgcttagtttgaaggaaatgtgggtattgtaatgccccaaggcttaggaattgttatagaagagaggacagaaagccagaggtgataaaatgactacaaggagactatcttttaggtacagcagggaatctgcatgtacaaactcacagtggttatagcaacacgcataaaacctgtgcaggcccaagcaggatcaaatcccattgtgcacacaaccccacccctggctgtggagctattggaaattgttagttgctggaagaagggaagtgagttttctctaagagtgtatctcttaggaagtggaccacacttcactggaagaccacacattcaggaatacttgggcagcagaagctggtattgaagatttagaaagagagagcgcgggttgagttagtggggaagcacatgtcacatgtgaaactctccaaaaaaaaaatattccttgacttcacagaagtgttttaatttcatgatatcccatttgttggtgttggtattattttctgagtgtcttggtatttttttctcttgcagttttcaatattttttattctatatgtgaaatattgtgactataattttgatatctctgttcctgtctgtgttgtgttgtaatgctgtttctacctacatagccacttccccctatatctaacttcatttctactatgattttattttaaaaatgtttctatgctattagtttgaaattctgctatgccaattatttgtagattttatcttttcagtgtctcatggatcttgaatagacatgttttgtatattgtgtgtgtatggttgcatgcactctgtgtatttgtatatgtgtgggtgcatgtgctacagcaggcttgtagaaatatcagaggaaaacttgtggcagtcagttctctcctaccatttgggagattgaacttaggtctaaaggcttgttggcaaattcatttaatcactgccctgtctctctagcccttagtcccttgttttttggttaatactttgatagtgtttcattttaaactctattccccgctccatgattagaaaaatgaatgctgtcagtctgctcccacagtttgtacagtgaaagaccctggaatcaaatgtttgttctcatatataactgctttttagttagactcataagctaagcagatgattttaaaagtggctcatggctggtccatcccagtcaccacttggtcctagacatcagccatgattgtgacggtaggcctgattgaaaagatccatgtagggcagggagaggaagtgagggctacagggtatgggtagctttatagcttctagaggccacatcacctgactgctacccctcaggagtcatttttagcatcaactagcagaagcctcttcttgtctttcttcataatcctccatggtttcagctgaggaccaggagtcaacaatgtcttgaggatagggtactgagggggttgcccatggagacacaggcatgacatgcattccccagctcccatatggctcatcagattcaagcacaacatacatcttcttatccatatgtcagccagccaatggatcatagatggccagagtttgctcatgtgcagctgtgtggtgatttggccatgtacattgctttggttcaccagacatgagcatcagtctgaaccacctgggctggcttgaaagatcctacaaagttctagtggagaattatgtgcttcaagtccaagaccatgccctgaaaacagtgttctattaccaaggtatgaagctggtcattgtctaaattattgagacaaaggtgaaagctttggtgaagatatccttaggctcttcagagaaaccctttgttttaaaattagcataaattcttttatttttcacattggcagtttgatgccatattctttgtttggttctctgtgtgtcagtcttttctttgaaagaaatgacatttgagcattacctttagagggagcatgggaatcaaatataccagcttggataggccagatggacagggagtgtcgttcctgaggaattaccaatcctgctttgctgggtcattccaaaaatagcttctctgttttgtatttgggtagaagttgtaaaacattttctggttcctgttggaacatagctgtggactgagtcagcagaactggttcctgttggaacatagctgtggactgagtcagcagaactggttcctgttggaacatagctgtggactgagtcagcagaactggttcctgttggaacatagctgtggactgagtcagcagaactggttcctgttggaacatagctgtggactgagtcagcagaactggttcctgttggaacatagctgtggactgagtcagcagaactggttcctgttggaacatagctgtggactgagtcagcagaactggttcctgttggaacatagctgtggactgagtcagcagaactggctgctgaggttaccatcttaaagtcctagatgagcaggacaaccccaaagtcacagtgaccaccatttttcatgaccccttaataatctaagagtttggtgacatttcatacatttttgttgttatgtagctatcaagacatcccatcctaaaaagtgaaagattgtaatactacttccctgttgtctccctgccctagcctcacccactgtctctaagattgcctcctccaggattcaaacggaactgttcagtttatctttttattgctgctttatttcacttagattaatgccaagacttgttcatgttgtagcatgtttcagaatctctttccttgtttaagaaatgtttcaaaacatgccctccccccatgtggctgggcacttatgtgatgcacagacatatatatagacaaacactctacacataagatatacgttaataaagaaaagagaatttgactgattgtcttggatatataagtaaaaatacaagtgcctttagtcgtattattatatttattatcaattttttttccttagtggacaagaagcctaagaaataaagtcatctgtctagaccacaaaaaaccaaaagctgcccgtgggtgtcctcctaagggattaccaaaaaggtaagctaggtatttatgtgtgacatagaatgggtttatacagtgcatagacagcgtgaccaggagtgattatttgatgcttgttggctctcagttaacatgtttaaaatagaagggtctgaactcagtgtcctctaagattgctttttttttgtgattataattttctttactaattgtttttatgtatttggtacatcttgataagctttggctgacagggtaagaattatagactgataatacttcttgattcatatttgtcatcggtgtttttttttttttttttttttttgagacagggtttctctgtacagccctggctgtcctggaaatcactttgtagaccaggctggccttgaacttagaaatccgcctgcctctgcttcccaagtgctgggattaaacatatgtgccaccactgcccagctgtcatcagtgtctttttttctttttcaatttttttttattagatattttcttcacttacatttcaaatgctatcccaaaagtcgcctataccctccctctgccctgcttccctacccacccactctcacttcttggccctagtgttcccctgtactggggtatataaagtttgcaagaccaaggggcctctcttcccaatgatggctgatgtcatcagtgtcttaaaaggtacattattcagcaactcttacttgatacagtcatagtatccacaaattacggatatagtaaactcagtatctggagattcaaacaattattttcagaaggaatttaggacacaccagggttggatatcagtccgtggttagaaagttattattttaataaagagtttagtatttcctctttaaacaagatgaagaacagtaacaatgaagtaaaacttataattattagatcatgcatacttagaagatttattaaatttcccgatagaatacttttgtaagctactgataaaggaaactgtagaaaatatatattgttgtcatcatagcagtttatgaacctgttgatagtctttcatagtatagataaattgaggcacaaggatacaagcttagggccagcctggactagagcatgagttcaagaccagtatggacaacatagactctgtgttataataaaaaggtaagaatgcactggtgacatcaccaagtgttagagcactagcctaacctgtgtgagggagaccctgtgctcaattcagagggtggtgggagatgagggcctgagagccccaattaagtgtcccttataagagttgccttggtcatgatgtctcttctcagcaatggaacccctaactatgacagtcccttgattctgcatttgtggtaagacagatgatcatagtttatgagtatgtggcaaagaagaacagcagcaagaaggcaaagccaagagacatctccaagtacatacactcagtgcctccttccccctacagttctcccacctcagaatagtttattcaaaattcacatccatcagtggaacaaacagttaactaggttagagttctcatgattgtctctggaaagccctcctaggtatgcccaagtttgccttactaattatcctaggtcccttccaatctaatccacatgacattcgaaattaaccattgcaagtccattccttgctgatttgatacctaacaacatgtcttttatcataacattctacccctgcctccagtggctcatgtccatctctttgacttcccacagtagtaaaagcttcagcattgttcagaaatctgaattcaaagtttcttctgagactcaagacaaactcctgttaaatcaaaccaagttacatacttctaagatacattagggcagagtaaatattcttattcttaattggagactgctgttgaaaacaccaggctcaatccccagtgaactgaatatagtctataaaagtagttaccacccaggagggtatagatccactatgagaatacagtaatagtaaagtaaaaaacagtcacttcttagtgccttaggaagtacagagacactgatagtttttttgttttcaaatgtattagttactgtatgagtagaaaggaaagaaaaaaacaaaacaaaacaaaaccagggttttgggttggtaaaagtgtagggaaaaaaatcacaaatagaagggaatagtaggatcccaaaatggggaagggtagatgcaggagcagtcttctaagggaagactggaataaaaaaggtaaaaacatgtgcagttagatattgtacagtacctttaggaggccgagagacagagacctcaaacccaggccagaccatgttctttgggagaagaaaatgctacagaaagtataaacaggaaaaacaaacaaaagttaaaccagggatgtagaataagaacagagcagggccaacctggcccactaaattgagttggtcatctaaacagtagggaaatgtggagaggagagaggtgggtggacaaaaaggatctgaaaactacatgctagacgcaaactgcagtttcttggctgtttgcctgactctcagatcctgtctcaccccaaggagtccttcagttctcacctcttaagtgttcctttgagatagattagggattggcagtgttgcacaagtggggacttagatactgctcacactgctgggtggttgcagatgctggcactgctcctgtgtgaacctttttactgtccagaacactgctgagaacccatgggaaacttttctgctgcggactggcctcagtcggcccctcaaccctcgggagaatcagggtccctgtacaggtgggcagggaggcaacaaaaagtgacaaacagatgtgaacacaatgggagtgttgatctgaatgtaatttctcaaagcgagcaccagacttataataacagaagaaaaccaagaaagctagatgatacatcacccaaggtacacttagatgcttaatggttctttacccaaaacaaagaaaaatgcatacataaaagctagcaggagccaggcagagtttacaactgagatagtaacagctctatgtaaaatcagctattcacaggagccaggtgaaaggtctgatgcaatgctagtctattgttaaacccaccaccaggggtcccttattaaatacctaattatgctattcctctgggcctagtgaaaaacatgcatcaggggagttctgttctattaaccctttcatgaataatacaatactccagttcctccttaattcacaacccaccttctttctactattatgtaatgtaggctgccattcatgtctgtaatgagaattctaagtatactttgctaagcttgccgtgagatttctagctcctatcctgtaaaatactgcaggaaagcatgcaagaccctccacactattgcagggacaaatttggagcattcatgctatgggaatgccaaggttccaggaggctaagtttccgtgaaacatttttgccttgggactgcgtccaagcgtttggacctgccacacagtcttcactggagtaggtgtggcacttctctttcagaatttgactaccaccaggtttttggtttttgaaatactacagttgtaactcaaggtttgttcacgtcagtctagcagtaatctctgggcaggtttctacctattgtccagcaacacttgttctgtatttcctgagagtgcactgtggatggccttagactactgagaccattcaagcatgagtcttctgtgaaatggcatgtcattgcagttattgcagatggtgagtgctgatcactgagtaccaagtactaagaagagagatttttcatggcatccattgctgccatcctggatatagccttttattcagctctttagaatttctgttactagggactggagtactaactcagttggcaaagtacttttaaggggaccagatatcaatcccagaacccagaaatgggtaaagtatattgtacttgtaatcctagcactgttcaaatagagacagacccatctttggggctcactggatagccagtttactttgtcaagttctaggctagtgagggacttcgtctcagaaaaaggtagatggtgttctgagaacaacaggtgtgcatgtgtacctgatccccaacatatgtgcaaagagtgcctgttgacatttttgagtcagttggcttttcttgtttcttgtgtttctaaatgggtatctctttcaattttatttgggggatcttactgagcagtctaccttcgaaggctcaattccctatacaactgtgaagagaaaacatactgcgccaacaacaacagcaacaacaacaacaacattaaaccttacagaagatagagaaaatgtactcaaaattcatgaaagccatctgccatatcatcagtgattgtaaactgaaaatggaagagctgtagcagaatatactatgaagttaagaattacttaaagcagggaaatacatgagtgagatcaaaggaggtagagacagggaaaaacaggggaacaaggtgaagggaaggaacaagaagtcgagaaggacatttgagagcaagaaaaaagcaagattagcaaaaataaaaatgcaagggtttcttaacaaggaaaaagttggggactggagaggtgattcagcaattaagaggactgactattcttctagtggtcctgagttcaattcccaacaaccacatggtggctcacaaccatctgtaatgggatctgatgccctcttcttgtgtgtttggagagagcaattgtatactcacatatataattaaatcttaaaaaagaggaaaaagttaaaatggtgagataaatgtaagaaggggaataaaagataaaacagaaaagtatataaaaagtaaattcaaaatagttctaagaatggaggattgagaggaggagacagaggacaagaaaggaaattaggaaaagacaaaatactgcacagtagtgaaaacttaagttagatgtatgtgtaactgggaatagcaaaactaaaaagttttggaaaatataaaataatgtaaatctactgctgaaaagtacagtaagaagaaagaaggggaatcccaaagtcaaaaggaagaaaatggtgagatgttagagtgcttgcttcttaggtcctagaaacttcagagaggggagatagggtcagatggactctgattcttatcctttctgcagattaggctattgctgaacctgttttggacaagaatatgatgccttccaaaagtatcttcacttcttttattaccggggttctctgttgtgcataattgttaatgttttgctatctgtggtctaggcaggtgtttcaccctccagggttactctagctcatattccctagggtgattaatgtttagttggagtgtgtcttcctagtgtttcaagaatataggaagcagtcacagcattgagctcattatgggtaaagaaccaattattgcgttttagggttactaagttacattataggttgctatggtagaacaccatgaccaaaagcagcttggggaggaaagggcttatttatggtttatgcttccatattgttgttcatcatcaaaagtcaggatagaaactcaaacagggaaggaagctggaggcaggagctgatggaggagtgctgcttaatagtttgttctccatggcttgcccagcctgctttcttatagaactcaggatctcctgcccaggggtagctccacccacaatgggctatggcttcccatatcagtcactaagaaaatgccccacaagattgcctatagtccagtcttatggaggcatttctcaattgtcttccacttttccagggactctagcttgagtcaagttttcctaaaattaaccagaaagaactgtgctttgaaagcctcctattttcctagttgaagtgttgtagatgtgactattaggtacatccctgtaagtcagagttcttggactctatagcagtgaacagtagttagctctatggtttaatactttattggccccagcctcatgacgattaagttccaagattaatcccagttgattagataaccctggccaggtgcttccctgggccatctttgtgattgttacctttgttaggtccaatgatagaacagtttttaatactagtctctttcccaggatgccttctggcagcagtcatcaagccatatagtagaaaaaatgggatttacctggtcttaaccaaaattagtcattgggtttgagtcttgtaaggactagtgtgctttagagtaggattgtctatgtctcagacagcttacgttttggaagtgatttctgcttccctgctctcctgctagggagcttcccagatgatgccctgtttaccttacttcttgtccatttgtggtccatcctttttccatacctttctgatagtctttcatttgttttctggatttttgaagctcttctctttctgtgtttggaatagagtctgttacttctttccttcctcctctcttctcttcttcttttcttcccttctatcttcctttagaaaaagatttatttatttattttatatgagcacaccgttgctgtcttcagacacaccagaaggcagcattggatcccattacagatggttgtgagctactatgtggttgctgggaattgaactcaggagctctggaagaacagccatttcaccagctggagtctgttgttgttgttgttggttttttttaaaaatactttttattaggtattttcctcatttacatttccaatgctatcccaaaagtcccccataccctcccacccacacccctacccacccactcccactttttggccgtggcgttcccctgtactggggcatataaagtttgcaagtccaatgggcctctctttccagtgatggccgactaggccatcttttgatgcatatgcagctagagtcaagagctcaggggtactggttagttcataatgttgttccacctatagggttgcagatccctttagctccttgggtattttctctagctcctcctttgtgattgggttaccttactcaggatgataccctctgggtccatccatttgcctaggaatttcataaattcattctttttaatagctgagtagtactccattgtgtaaatgtaccacattttctgtatccattcctctgttgaggggcatctgggttctttccagcttctggctattataaataaggctgctatgaacatagtggtatgcccaggagaggtattacaggatcctccggtagtactatatccagttttctgaggaaccgccagactgctttccagagtggttgtacaagcttgcaatctcaacaacaatggaggagtgttcctctttctccacatcctcgccagcatctgctgtcacctgaatttttcatcttagccattctgactggtgtgaaatggaatctcagggttgttttgatttgcatttccctgatgattaagaatgttgaacattttttcaggtgcttctcagccattcggtattcctcaggtgagaattctttgtttagctctgagccccattttttaatggggttatttggttttctggagtccaccttcttgagttctttatatatattggatattagtcccctatctgatttaggataggtaaagatcctctcccaatctgttggtgccctttttgtcttattgacggtgtcttttgccttgcagaagcttagcaatttaatggacaagtttctagacagataccaggtaccaaagttaaatcaagatcagtttaatgatctaaacagtcctatatcccctaaagaaatagaagcagtcattaatagtctcccaaccaaaaaaaagcccaggaccagatgggtttagtgcagagttctaccagaccttcaaagaagacctaatcccagttctgcacaaactattccacaaaatagaagtagaaggtactttacccaactcattctatgaagccataattactctgatacctaaaccacaaaaagacccaacaaagatagagaacttcagaccaatttcccttatgaatatcgatgcaaaaatcctcaataaagttctcgctaaccgaatccaagaacacatcaaagcagtcatccatcctgaccaagtaggtttcatcccagggatgcagggatggtttaatatacgaaaatccatcaatgtaatccagtatataaaccaactcaaagacaaaaaccacatgatcatctcgttagatgcagaaaaagcatttgacaaaatccaacacccattcatgataaaagtcttggaaagatcaggaattcaaggcccatacctaaacatgataaaagcaatctacagcaaaccagtagccaacatcaaagtaaatggtaagaagctggaagcaatcccactaaaatcagggactagacaaggctgcccactttctccctacctattcaacatagtacttgaagtcctagccagagcaatttaacaacaaaaggagatcaaggggatacaaattggaaaagatgaagtcaaaatatcactttttgcagatgataatgttagtatatataagtgaccctaaaaattctaccagagaactcctaaacctgataaacagcttcggtgaagtagctggatataaaattaactcaaacaagtcaatggcctttctctacacaaagaataaacaggctgagaaagaaattagggaaacaacacccttctcaatagtcacaaataatataaaataccttggcgtgagtctaactaaggaagtggaagatctgtatgataagaacttcaagtccctgaagaaagaaattttagaagatctcagaagatggaaagatctcccatgctcatggactggcaggatcaatatagtaaaaatggctatcttgccaaaagcaatctacagattcaatgcaatccccatcaaaattccaattcaattcttcaacgaattagaaagggcaatcggcatattcatctggaataacaaaaacctaggatagcaaaacctcttctcaaggataaaagaacctctggtggaatcaccatgcctgacctaaagctgtactacagagcaattgtgataaaaactgcatggtactggtatagtgacagacaagtagaccaatggaatagaattgaagacccagaaatgaacccacacacctatggtcacttgatcttcgacaagggagctaaaaccatccagtggaaaaaagacagcattttcaacaaatggtgctggcacaactggttgttatcgtgtagaagaatgcgaattgatccattcctatctccttgtactaaggtcaaatctaagtggattaaggaactccacataaaaccagagacactgaaacttactgaggagaaagtagggaaaaccctcgaagatatgggtacaggggaaaaattcctgaatagaacagcaatggcttgtgctgtaagatcgagaatctacaaatgggacctaataaaattgcaaagcttctgcaaggcaaaagagtctgttgttttatttcttactttctcctttactgactaaattgaaggtagcttctagaccaccatctctcctagaagccctgagtattctattttagccaaagacatcaagaaacaaaaattgaataaagaaaaaatatatgagcaattataaaactagtcctgctataacagttgtgcttctttcatacatgctttaagaaacacacacacacacaaaagaaacacacacacatacatactcacctttattttttgacaaagcataattttttgaaagaaatatacttgtttctatatttctgggtatactggtaaatgcctttaatctcagtactcaggaggcagaggcaggcagatctctatcaggtcaaggctagcctggtctacctagtgagttccaggacagccagtgctacagagtgagacactaactcaaaaaacaaaaaagaaaagaaagaagaaagagaaagagacagagagagacagaggatggagggaagtaggagaaagtacgaaatatggttgtttcttaaagcatgtatgaaagaaagcacaactgttacagcaggactcgttttgtaattgctcatatatttttctttattcagtcgttttattggcaattgttagttcctggaagagggagagtgagtttctctaagaatgtagctcttaggaagtagaccacactccactggaagaccacacattcaagagtatttgggcagcacaaactggtattaatggtttaaaagagagagacataaagttggttgggtagggaagcttatgatcaagacacacatgaaactctcaaaaaattaaatgtttcttgatgtctttggctgttgtctccagttgtggaggggatgataagcccaaactctggaaatatttaccagacaacacataatatgaaaggttttgtttttgtttttctagataggttttctgtgtgtaatattcctggcccctatagaccaaatgtttgaatgcttggccagagggaatggcactattaggatgcatggccttattggaggaggtgtggtctgtttagagcaagcatggcactgtggagtcagggctttgaggtcatatagactcaagctctgtccagtgttgaacatagtctctttctggtgcctgaggatcaagatgtaaattcttggcttccctagggagcactatgtctgctagcatgctgctatgcttcttgccatgatgataatggagctgtaagttagccccaattaaatgttttctattataagaattgccatggtcatgggtctctttgtagtgtagggggattttaattcagcaacatggttcctctgacaaaggctttctaggtctctgtgatccagctggagtgaagacatactttggattatagtatgatgtggttggaatacagacatgcttttagtacacaccttaaatcccaaacagtgaaggtaggttagtttatagaaggaaacaggcatgtttgaaagtgacatctaattgagtggcagaccaagtgatgaatcagagaaagatttgacagaatgactcagagacaggacatgaccaactcttatgagaacagaaagtttgttttgtttttaactaagagtttcttattagaccagttttatagagacaggtggcagagagaacctgcaagtgaagacaaaacaaccggaaaatgagaaggagccaaaggattaaaacatattgccagaattagtatgaggccaggcagagcaattcagtcagaagccaagagaagtgagtttgaatcagtcagcttggaaaggagtttaggacagagcagcagagttgagacagccagagttcagaaagaactaaaatgctcgagaatggctgtcatatcatcttctcatctgaagaaataatgcaatgaaatcctaactaagacatgtggatacctaaccctggggtggtatggtcctatatcaacctgtaatgtgataactgatgtgtcttgatgtacatcaaagactaacaaggagagaactctgatctattcctgaggtttctgctcaccgttgtctgctgttgactttatttacctgcccacctgcccacttttttgcctggtccgaatcctcagtttcttgcatttggactcctggttggcctttgatgtcatagctggactctattactttgctctccagcaacaaccccttcttggtgctggtcttggttccttactctattactatagtctcttctctcagttcatttctcaagccgttgaactctgctgcagcctcttttttattcattgtgtaaaccacatatgtacatgtctatatagacatatctatctatagtgtaccgtgtgatgtgtcgtatgagaataattaagtgggaattactagcattggttactaattagtactaattaaggactaattagtaattaatattaggaagtaagattgaattcacctgggaaattggagtcaacttgaaaatttcaacatttatatattcagttttctcaggacaatttattgaagacaatgtcctttctctttagcttttagtgcctttcttgaaaatcagtttcctgtaaatggacgtgtttagttacagactgtattctgttccattgatctatgttttatgataacacctgtgtaattttggttactgtgactttgtacatcttgtatatcttgaaatcagccattgtgatagcttaagttttgtttttactcaagattttttttgcctattcagtttttttccttccatgtgaattttaagattatatttgttactattcttttgatataaccaattacctgataagaagcaacttgaggaaggaagggtttatcttggctgatgatctaggaaaggtatcttagtgttctgttgctggaaaagtagctgagagctttgtgtcatagtaaaaccctgcttgtttcagaggaaatgacaatctctcatcacagtagcttaaatgatggtttgaattatattctggaatataagttcctctaagacaagaatcatttactatttactgatatgccttcctgtagatcctcctagtatagttgttttgttagaagattttcagtaaatatttgttgaatatactattactgacttaaagagatttaaactcatttctgtattctttataccttaatttttcattttatcaatttaacatgtttccatagaagttttcctaggaattgcaccatctttcctttagatcgtctattgtactgtcatcaaggagctgctacaaagagatttttaaaaaaaaatttcattgggaaatttcctgctttattttgaaaatacatgaacattttgttttctgtttcttaatattgttgtatttgtttaataatgaaaagatgtctaaaagtgcttcctatgtcataaaacagactcttctgattaaacacttgtgattaacattttagccattccttatttgactttgtttaaagtctgtgtggtagcccaattacacccctgcgaaaactgtattcaatggcttgaggactgacaatagtttttagataatgtcagcaaagaaaaatatattgagtgaataaatgcacagatatgatgaagcaaaactgtgtttctcaggcttatgttgatgtttgctgagggcatgcggtccttgtactcacagtaggcactagagataaatacacaggcttgtctctcagaggaaggagatgtttatcttttcccacccagaaaactaagaatggtagtttatgatggtggtcttttgctgtcggtgggggccaggcttcatctgaatccagacctgaatcctccagacttacatttgttagttactctccatagaaccttatcttgagcattgttcctgaatgaacaaaacccagctttctggaagaggccatatgtactttgtaaagagtttcactgtaagcatgtcttaagctttgttgtatacattggattggattaattatcatcaggatactttttccaagcttgtgctatgcttaaatatggcggaaataaactacttggagccagagtctaggagtatgaactaacactgattaagttgtattgaaccagatttcctcttgcttcattaatatcttcctctgccagcccttgtatttgcagaatcccccacagttgttaccacaaaagacaatgtttatttatccacgttagaaaaaaggtaaaataagagtgtcgttttctcttagttttaatgtattttctaaattcctgtatgctaaagcaaaagcacacttgtaacacagaaagcggttgcttctgtggtgagagctgcagatgcatctgcacttcccactaaccgtgggaaagtgggagttgctaggaatcagacaactacatacttctgaggatggttatagtttgtctgatataattttgaagaaatcccaatgtaagtgaagtaggctttactttttaatgtgtcattgagaatgactagacatttgttttttatttatactgtttacaattattttctgaaagtgaaattcctactttgaggagatactcacttgttaaggtttgtaataaatgcatgtattgtataacatttagaaccacatgtattaattatctgtgtatgtaacaggcatctcagagttatgttgacgaatgttctatggacggacttaggacgagaattcagaaagaccctgcctagaaaggatgctaatttatgtgctcccagcaaggtgcaatcagactcattgccttcgacatctgttgacagcatagagacatgtcaaagattagatcctcttcaccaaagccttaatttatccgaaaggtacgttacatagtgttgattttgttccatacttttgactttcctacatatgaaataattccaatattcttaaaagattgctggagatgatagtaaagatgagtgcatacaagtgtgttccactctagcacaagccttagaggcttccatctggctttcagttagatgatgcttctgacaagggattaaaatgctctttattccatttaatttactttatgattgatcaatgtatatattttagaaatttatgctataaacattatatgcatatttgaatatatgtccatgttaatgtttattttttacctcttacatcatttcccccattccttttcctccctccaaacaccctcatgttctcatggcttttctttaatcattatttctgcaaatatacatatatatacatacatatatttatttatggatacatatacaaataccacatgctgaatccttttagtgtgcttgcatggatatgtttttagggctgaccaccaattagagtcctgaggaagactgaatttctctctccctctatcagcagtcgttcattacctaggggtgagatctcttccatgttggcatatcacctatgagtgtcattgttcagattattcagggttaggaacctttgttgttgagattgtattactgacgcttccatgccatatataggaggtgctgtcttgtagcagaagttatgattctctggctcttagagcatttcagcttcctcttctgtgatgttctttgagccttaggtgtagggattgtgttgtgatgtatcagctggggctgagtacttgatggtcagttgctctctgcatttttaaccctgatttctggctttctatattggcctctatctgctgtaaaaagaagcttctttgatgagcaatgagaatcacactcacccgtaagggcataaagatacgtattaaggatgcagttagagattatagtcctttggggaagtggcagtagtaagtttcatgacttagccagctataggtgggtgcttaggtttatagtttcaggcatgaattccttcttgttgaaaaattttaagcccagtgaagtggctgttgtttactctcaagatatgagtgccactattgcaccctcggggaaatcatgccatgtggtcattgtggttcgaaggtcttacatctgggtaggatgactgcttttctcctttggcagtttgcaacaccttctgatactgtgagaagtggttttcagggaggaggtttccaggtcctatccagctggatttctccagtcgtgtgtctcaagtgtacggtgtcttcagcaacaggatcttcccttcatcttctggaaggcagccaagggcagttgacaatagtctgtattgttttgggagtctcttggactctcctgaccaacagcttgaaggcagtttcccatacctggtactggaggttttattagatattctatagctcttgggggaacattatcacccaccccctaagcccccaagtagtttaattttaattactaattatatagttgtaactttaattttttcaaatcttatttttaatgattgttcttttttcttttcttttttcggtttttcgagacaaggtttctctgtgtagccctcgctgtcctggaactcactttgtagaccaggctagcctagaactcagaaatccgactgcctctgtctcccaagtgctgggattaaatgcatgtgccaccacctcccagctctaatgatggttcttaaatgctttaacctttattgtaactcaccacccaccagaggtagtggaacaggaacgagatgggggaaatggacctatttagaaggattctgtgaagcaactcctgctgtgttgtttagatatcggcagttcacttcacaggttagcaggtagcagcagcttgatccactcacaaacacctcattgatacaccagcagttcagtagagtctggttagcaacagtggtgacacaacctagcaaagacagccgagccttatcctctgcttgagtcagcaggagggtccaacgggaacaccagaagttctcagctgtgcctctcagggaagtgaagatctgtgaagacaggagacccacaagcattgcacagctagctgtaccagcaagccaagctctgcctccatcactcagtggagtcctatttataccctccaaacatcacgtgtccacgtgccttgcctcagcacatgcatccaatgagccttggaagcggcaagaaactgcagcacactaccaggagttttggtgtttttctctatggagtcccgacaaatgcagcttaactctgcaatgtagggtggagcaatacatgcatgtcattagcaaagaatctttcatcacaagtcctttcacctgcttgctttagtagagcatcttctctcctgggtctgcttcaacaaaatgtcttagtctttcacacatgtgtctactttaacaaaacatttcttcacgtgtttgccccagcaaaacaccatccaatcgactttccaaagaacccttaagttctcacttcatatagtaattatatattaatgcactatatatggcatatatacacatacatatgtaattatatatgtactcttatatatatatgtacttttgagtaaacataaaacaatgtgattccctatgacttttaaaaatattcatagtgccatttatctgtcctgccttttcttctgtattgctgtccccctccaccagagaaaggtcctcaaatttcctcatttcccctttcatagcacccatattctatcactcctctctctagagctcctccaccactatggctccttttttttagatcttagcatagattttaaactgaacttaatctggattctcactacttttggctttgtgaatgttctcataatttttacatattgattcaatatagacattgattttaatattattaaaatattgctttcacattttaaataacaaatattcagtttatttttaaaaaataattagacaaaattctgtgttttttgaaaaaaaaattatttctttttctttacatttatgtgcgcttgcccacagacaccaggagaaagtgttggctctcctagaactggagttgcagataatgtgatccaccatgtgggtgctgggaacaagactctagtcatctacaagagcagcaaggctcttaaccaccgagctgtatctccagcttcctagatttaaaaactgaatgtgaggtttggtggtaaaaagaaggaattagtttttggaatttgtaatctatgatataataatgtaatacttgtatatatttcatttagtttcagctctcaaaaaattcttttagggttggtaaattgtttagaatcagaataactttccccttactatggtagtgctttgattttacagcctataattaggaattccccctcccttcctttttttctggctttctgagacaggtccttactatttactctttgtaacccttggcctggaactctccatagataccagactgaccttgaactcacaaagatctgcctgccacctcccagcaccacagggcggttcacaaccatctgtaacaggatctaatgtcctcttttgccatgcaagcacacatgccaatgcagcactcacatgcatacattacataaataaatcttaaaaaaaaaatagtccctagttctcccccttccctagttcctggcattcagctgaggtctaggtttactaagctcagacttgtttcaaagtataaacagtctttactttcaactcacccttatgtttgttgccctttgctgtctgagtgactggctcacccatatactaagctctgtaaattagaacttgggaatggctgtaactcccttttattttcattccttacatctcatcattgtgatgtaaatctatacagaaatagtgtttcatctttattgccagcgctccagtctaagtgttgtgggaaatattaaaaagaatgacaagttcccgtgccccagcagcctggccagccatgcactggtggacaatggccaacctgtttttttttaatctcatggagactctgactcagagctccaaaatctctccactcagcttgctaaattcccactggcgggtagctaccacaccagccccatgcttcacaaccctcatgacctttgtggtgcccctcaggcaaacccacattttgccagcagtacctttctctcttgaacccagacaagcttccatgtgaaggaaaacacaacacaaacttagttcagaaataatggtaactcaatctctgggcgcaacaattaaaatactaacttgtaaaccctattaaatctaaatcctctgctggcaaatcctgatggatccaccattgaaactaggagacactggtaattacctcttgtcctcacggtatctcagtccaaaaagagccctcttgcttcctctcctccactcctcttctcgtccactctccaaaccggaagtccctcctactcacccagtgattggcttctttattcattaggggattggttcacaagaagtcacctgagtatatgactcactccctgtccttagagccccgcccaggagagtagaattagcatcaaaatacaaacagcaccagacccatccacagcatctaagccccaataacttagtgtctttattattatgatagccacttgttcgggcttcctgagtatgaacttttcttatcaagccattccttacatttgaaagtcacatgaaacttgttactcacgagtttatatctgtctggatccttgtaaccttcaagtttggcacacaaatgccaaatgactgacccactgactgtttggtccgtgtctgtttgctctccatatttatattattcttgggaaactgtttatatctcactgaaagccatgtgctgtttcattttcttcattcttttatcttgtaaacaatctcctcttccccttttactgatttctgctggttctaaatcctgatctcattcatctttgtctccttctcacacgcggctgcacttgaaacctccctctgtcctcttcaacagcctgttcatcatagcacacatactgtgatttgtagcttctttgtatgtatccttgacaggaaactttaggagaacagggcctgtattacactttattcctttttcctagtacagtattaggcatatattaaatggtaagtatttgctgaatggaagaaacagttcctaccggaggaccatattcagactttttattgatacatatcctcttctattagaatgaattttcggctctgtaattttgatgacaacctagaaaagagattccaagccttgaataaggacctggagacctcttgggtatggctttggatgagtgtgttctgagacttgctgttttcaccaggagctttgtgtcgcttcagtcttctgatgtttgacaggaggccttttgccttagtttcatttttacccagcagatgaaaatttacctctgcctctaaatttcatcctaaagtttaacttttaagtaaacaaaattacttaattgagtactgaaatgactttttattagaaattttacttttcattctggtatgtaagagcaatgaactaacctccttgcttttttctgtaaggacagtttatcccattcattcctggatcagactaacaggacaaatagaaaacacatgggtcaaatcaactatataatgtaataagaataaagagtcgggagttatagaaataccaggctagcaggtatttaaaaaacgaaacgtggcgcttgttttaaatttgattccttaattgtttgattctctccggtccctacatcctctcttttttttttatttatttatttatttatttatttatttatttatttatatttttatgagacagagtttctctgtaatgttgcctatcctgaaactcactgtgttgaccaggctggcctaaaggtcacagagatccccctacctctgcctctcgagtgctgggaatatagacatgcaccagcaccgccccagcatgtttgattctttctaaaggacatgccagtacacgtctctttataggcgagcttatttccacatgtggttcacatttattttcctggttgaaaatttctagacatttataagctttggtcagcaggagctgagttggacatacacagagggtaaacttactcttgctttcatttattggcagtggcagtgattagtgaagtacagaatacaatacactcatatttttccaatgaatttatactcggaatttgtctaaatggtgtatttattatttttcttaaattatacatttgaaacaacaacaacaaaaaaactcagtgaattccaaatactgttcttattttatgatttctttaggccagtattattctagttgagtgataatgtgttcatttcaattttataaacggaaaaagaaacctgtgaagtttagggctagggacgtggctttgtgagtaaagtgctgagaaagagacatgagagcttgatgttgatctcatgtactgggatccctcacccatattaaaagcaggatgtagtggggtgggtttgcagtcacagtgctggggaggacaagtaggagggacactggggctcactgactgcccagcctagcttaattggcaagccctaggccccaagtgggggtctttgttaaaaaaataatgtgtgcagctcccaaggaacaaaacctacagttgtcctcttgtcttctacatgcacacatatacacatgtgtgtacatattctcccccaacatgcatccatctacacacaaacacatacatattcctgcccccacacatacatatctgtatacctacacacacacaaagagcaaaaaggaaatctgtggatctcttaaagttatgggccagtgagatggccgaggggtaagaacactttgtgttcaagcttgacctgagtttaatccctgaaattcaccatggaagactggaactaacttctgaaggttgtcttctaccctatacatgtatataataataaacaaatgttttaaaagaagagaataaaaaaggaaaaactaacagttcttttatagtttgaattatgtcgtctgagaaatgagtggatttataatatccttgttaaaatgcaacacagtatattttaggatgatattaatgtgaatttcacaaaaatgaaagtggattagtattgcaacttcctatattgcagctatattaagaggtataattacaagttttcagtgtactttattagaaatggctcttgagatgacttatatattaatatgtcattggttttccaatgtctccccatatttgtaccttattcctaccttgctgtacttttttcctaaattttatttatttatttaatgtatatgagtacactgtagctgtcttcagacactccagaagagggcatcagatcccattacagatggttgtgagccaccatgcagtggctgggaattgaactcaggacatctggaagagcagtcagtgctcttaactgctaaaccatctctccacctcctaccttgccatacataagccaaattgtaatagacattctgagaggataaagcctacaatggagtcatcagaaaaggcacagcttttccaacacacttttgctgtcttgtttttcagggttcatttctgctttagtttggtatagttatttttatattctgaaatgtaattttatagttatttcatataatttaccaataacatttacatatttaggaaaacaaattggatataatatatgacatgttaacttccatttctggattgtggattgagatagattgtaaaacttgagaacttcctgaaatacaaggtagctctgggtaacagcacagtactgatactactgatgctgtaagtacaaacttgtagttccaaagacaatctagccactagggatttagtttactttatagatctgtattctgtaaggacatcacacaaagctttactcttaaggtatccaaagtggattttatctgtacatgataagaaggcattagacaatggctgtgaattctgaagcactgagtataagaccatagtcattgctaggtgtgaagttacacttacttttcaaaagatcggattttcaacaagattgcagagtctgataggtacccaaattagcattgagtaagactccagtaatacgaaaattcaatcaagcttgcatttactttggctatagtacatgctagcaattgtgcttattgctttaaatgtttgtttgtttgtctgttgttgtttaattctcattgtggaaggtaggtactcttctgatagtagctctaaggtgctcagtgctcagaaacagaagttatggtaagtaactctcccaaaacagctgttatttggcggtggagtcagattcttctggtggtgagtggccacagcctgggagcctaattcgtttgccatgtgcctctctttaccttttcatcctcctgaaccctagtggtttgttttttctcctgcagtaaaatagaaattggactttactatgttattttatccattaattagttcattaaactattttttattttgttctgtgtaatcttccacatagtcaagaatgttttctagttgaaaagtgaagtattagggacatgttggtatacgccttgaacacagtgttggagagctttaaggtctgtggcatcttaagaaatgcagcttctactatagtttggtgtctaatctttcaaaaataatttttgtttgaattttgttttttctgttctaggaaagaagtttgagtttgtctgacttacatttcgtattcagcttacatttatttatcttttcaagtgttcagttctcctttttaatatttttctttcttcaaactctaccgatgtaaatgataacatgaggatggaatgtgagggccatctgtctacaaccttggtcatcccatcagtcccagagttgattgatggacctggctgtcttcggagctgccctcttccttcttcaccctccatgcgtgcgtccatcctgaagcgtccagcttgctctccctcagtagacgtgacctgctgaagtggcaggagcagcccagggtggtgtgggtagctctgctccatgctggggcctccaggacagctcaagacaattgggcagtcatttattatccaaagaaaattctgagcaatgcaccctcttcttgccgattttttgggtcagtttatcttttccagaatcatttaggactaaaatattttgtacacaacccctttatttcagaaacagtgtttattttaggaactgaacacttgaagccacctgtaaattatgccattgtcaggtatttaaactaacagttggcatttttttctttgatctattttctatgtgcccccaaacttctttctatatcctaaaacttttggattcactttttgtataatgagcaatactttattgattctcaaattgagttatcagtttagtatatcaggatctttttttttaagtaagtaaaattctatgtgcactaacatatttccttggaaaaatctggtgataacttaaatatgtttctgtcttattcccaaccttttctttttctgttttattttttttcccttagacaaatctcactgtgtagactgtatactctagaactcccagatatctcacttgcttcccaagtgttggaattacaggcatgtgccaccacacccagatcaatatttttcttgacgtgttagagccttagttgaattttattttagagcagtacatggtctgagattagacaaaagaaaccttgagtctcatttttgattcttcattacccacaccacttcaaatctagcattttttttcaatctagtacttcaaagcataattcaggcattaagtgtttaaagcagtattaagtaggatgcttgtaattataagtgatgcaacattaatgaaaaatatttctgctttgccttctccaaattgcagtgtactaggtggtagtcttccactctttctcagccttaatttaagggaactgtacttaccatcagctctggctttagatctcagatgctatttaatcattgtagaactttttaatgatggttataatagaaatggatattcaaggatttcctgaagtacctacctgtagaaatgcttagttactcatatcgcgttcttagaatgaaagaagcagaatgtccgaagacaggccctcagggaagagctacttggaagactcggccatatcactcaagactttggaatgatactctttgttgaaaatagagaactaatttaaagttactatctgtagctaattctatttgctgttatcagtgggtatgcatgtgtggtatgtgagaatgtgcacacgatatagcatacctgtgggggtcacagggggacttttgggagctgatcctctccttccaccttcatgtgagatctaagcattgacctcaggttgtcaggccattgcattagtcctaaagctcttttaaagcccaacattttatgtggtctggaatatagtgaaagtaacacagtgtctttacataatgaaaataaagagtacttccgcatatttaataatatttagtgatgttgacattttatttaagcagaagtacgtaaggcttttctaaaaacgtccttggtttccacaaaatatcagtggagtgtgttagctacatatttgtagtagataaggggatgtggggtgtaggaggaatgatgtgcataaacctctgcataaacaccaggggctgcatagctgcaaagtcatctccttcaggaggacctaattgaagactgctggagataccaaggattgctaacacagacaatgccagccaatcgggaactgctgtttaaaagatcaatgagtctctcttcgcaatgatggccgactaggctgtcttctgctacatatgcagctagagacacgagctctgggggcactttatatgcccagtacaggggaatgccagggccaagaagtgggagtaggtaggtaggggagcagggcagggggagggtataggggatagcatttgaaatgtaaatgaggaaaatatctaataaaaaattgaaaaaaaagttttttttttgttgttgtttttaaaaagatcaatgaggcgtaagcggagggtgttaaaggagcatcatttattcagaatagaagatgagtgacctagcagattttgctaccgtttttggttgtaaagatgcatgacatataatagtatatctgatagaaattcccccagtttagaaagtttaaatatttaaaaatacactataaatttctaaacctttagcctattggcccacttacccaatgctattattatgtgaacataggaatgaccataagcatgtgtgctgttccatttgtgggatctggaattatcatggatataatctgaatgttgtcttccttgttggatgaagcatttgtcatttgatgagtgtttaattacttatcagggatctttctctaaataaaaatacagttttcatggattggtttgaggtgatacgtatttttaataaatgctggaaaagaaaaaggcattttttttggagaaaaattagttaaactttaattgttgctatagcatctgttagtaaagttaaagacattatagtctcatactaataacctgtcctgggctttgtaagaaagaagtacttttagaaacaagattgtatctacccaaagttttgagtattcatacgttgattccctgaatgctacgatcctaataaagcttacttgcactgaagtaacaatatttgaaaattcaactttattgggtacattttttccctcttctttttctcctcccctgcatgaaaactctagtacagtacagtgtttgttattttatgtggcaggacacccagagttatactgacggatatccggcaaacagaattaggaagaaaatatttaaagatcccacctgtaactgaggccagtttgagtgatacagccaacctgaaatcagagcaacttttcttcatcatctgatggcagcttagagtcttgtcagagtgtaaatcatcacaagagctttttatctgaaaggtatgtctagtgataactttactaaaaatatatatatttattttcatgtgcctgatctttccttcagatatattattgtgttattataaatataaaacaaatgtgctttaatggctagtgtgacttttgcccataggatgtcttttggaagcagcagtttatggctattgatcagaatcaaaagtctattttgttttggaaaaatcgatatgggtcagtggactgtgccaggaaacttggtaaggttgcacagtttagaagccccggaactctgagagggaacctctgagagggtggcaggagcttcacctgctcctgacctgtcccctgtcacgtgaccatactccctaaataggaacatgacctgtggtcatatagatcagaacagagttctccatgctagtgaagtatttagaggccctgagggtttagccaataagcctcccttcctggacattcatttcttcctgcaaaaggtatttaatctctggtctaccctgagcaggtggtatgcactcattttccacaatgaacaatcaataaacagtttggcaccaatgactgtctctttcatcaagaaccgcatggaggagcctttgtctacagagctacaccatataagtcttctgcagaaggcccaaaggtccaaactcccagacttgccactgctcagctaagccggagttctccatttcccagcagcccgcccccagccccggggcttgtcctcagcctgagggccccttcccttccaactcctcaaaacccagtggtatctggatgtccaggagtttgggaggcccccggccctaggtgtctctttgcaggcccatggacccctgaccagtctgttccaactctgcgaggtttccagttgtgactggatgcctgggagtcaaggaaccccatctttggcctcccacatattagactgcattttcccaccccctgtgcgttgtattggtgctttcttcaaggccatcagccaacagtgggcataggataagtgcaatatagcatcactgcgttttgtctgtccagtggtgtcctcacaccctagcggtgaagggcggagccacatctggcacctacaatgtgggagggacatacccagctgatgcaaatcccagctggacccacgcaggcccacataggaactccagactatgagcaacctctggcgctagttccaaaacccagactttcccactctaaagacagacactctgacgtcttcccacttttgttttcgggtgtagatactccactgacctccatctaaatccagatagtccaatgggccattaacaaaaactgcaattgctacccccgcccccacgccctccgaccctgctgataaggtgccagaaagtttctatgctccttttctttccgttctacttttagggtgtacataaaacacccctccttcacctgccttctagcaataccagccaaggcaaacacctggggagaaaaagggacctgcctgctggagcagacagccacagctgaggcatggcagagcaggcctgtacccctccacctaggcaaacagagcctaccaagcaaggacagtagctaagatcttgctgctgagaatcaaaattttcatgctgctttgtttaaatgcttgttctttgcctagtaggagcacctaaaacaaaatacccaaaaatttcatgcttctttatttaaatgtttattttttttctgtaataggaacacctgaaataatgtttgtgtcttctaaactaagattgtcctaaaatttcttttaaactttaaaaataatatttaatatactcccataggtcaaaccaactacattaataaccattatttaatccttaattaacaactaatttccttttacagacaagttgttactgcctatcccagatacataattagcaggacattttcttcctcagccatctaaatcaaatgaattttcaattcttccctctggtttccttaatacaacacaggtgactccccacttgaaggatggcttctaggactgaattcctcaaacacccttgccctttttctaggaccatcacagcagagcaggatgtgctcgtaagaaaactgtacatacacattccccaccctgtgcagacatcccctgctggggttttgcttcttggttgtgatttttctacaggcttacctctaaaaaagggaaaaagagcactactgccacaggccagacggagactgaccagccatctcctggacctgcctgcaccaataaagctgcctttgtcatctgactaaacagttctgagacaagcagatgctgacagccttgggaccttccagtgacagataaactctcttgctaaatcaaatagataactgtttttttttttaaaccgatgttaatatccttacagactctgtacaaactcgatttcaatccactaaacattagttggttcagtaactccttgccttgctagcccccatcccttgttacttctctggcttgtgttgtgtttgatgcttgacgcttatacccacctacccggaattttcactacaaataacattcgaaacagtcactctaatgacatttcttctttataaaaggaaaaggaggagttgtggggcagtggactgtgctaggaaacttggtaaggttgcacagttgggaagccctggaacctctgagagggtggtaagagcttcacctgctcctgacctgtcccctgtcacgtgaccacactctgcacataaggacatgacctgtggtcacatagattagagttctccatgctggtgcggtacctagaggccccgagggcttagccaataagcctcccttcctggacattcatttcttcctgcaaaaggtatttaatctctggtctaccctgaggaggtggtatgcacctattttccctgatgaacaaacaaacagtttggaaccaaggactgtctctttcatcaagaacctcatggaggagcatggaggaagccttcgtctacagagctgcaccgtctattcttctgcagaaagtccgtcctcacttagacaatcaccgctgagctaaggacaattgctaattagctaagctgaagttcctcattccctaacccagtggcatctggatatccagaagtttaggatcccctagccctgggctcctcattgtaggtcatggaccccaaccctctgttcccaactcctctgcatgaattccagtggtggctggatgctcaggagtcagggaaccccagctttggcctcccacatcttaggctccatttccccactccctcagtggtgtatgggtagttccctcaagcccatcacccaatgcatgcataggataaatgcagtctaccgtctctgcatttttgcctgcccaagcggtgttcccacaccccagcaatggggttgtgtgaggaccacacaaacaatgaatgagacttttgttgtctgtttagtattcatacctatttatctggtataattgaaataattctattcctcccttcttttctcttcctgcctattcttccactcatctgtctgttcatttctttgtgaatccatccatccacctacccagcatccatccatcatccatccatctatcatctacccacccaccatccatccatcgacccacctaccatccactcaccatccatccataatccatctatctacccaccatccacccatcatctacccaccaaccatccatccataatcaatccatccacccacccaccatccatccacccacccatttttacccactgtgtttatactaggaaaactgaaactggcatttagtgctttagtaaatatttattgaataaatggctagatatactgctgacaagaatggtttgtaaaccaatgcaacttactgtagtacttaaaaatagatattaatttactcggcttcaggcgctaagtgggggtctagaattaagaaataatttgtgaaaaaaactagaaggtgctcagttaataaaagttagcgagtgtggttgagagacttttcgctctgcagcccagctatgcagtcttagacttgtgatcctttgccttcttgcaagtgcgatgcttcctttgtgtgggtaccactaagcctgactgccagacggttaaaaactttttgttgattctttgtgaattccacatcaggatccccaatcctacttatctttaaccctgttcctatgtatccaccctctgcccttgcaacctcccccaaaaagaaaagaaaaaagaaaagaagaaaacaacaacaatcaacaactccccccaaaacataaaaaatatcatcatggaagttgtattgtgtcacagtacacacttgaccacacatttttccttgcaaatgttcattgcaatggtcattggtctggtttgagacctctggcttctgctacactatcaatactggatcctcaccaggactcttcttggatatcctgttgttgccctgtgtcctggagatcctgcagtttcagatatgtaggactaggccttttcatgcacccagtagttcttggatggggtagatgttgggtgggccaactcatagctctggatctgggcctaggaggagttgagttggttagcctgccagctctcctgcacagcaccaccagggtaagctctccagcactgctccaggtagctcatccagtgctgcagctagcaaggggcagggtcagctctcctcttataccctcaggtctgatgtcttagggtttaattgctgtgaagagacaccatgaccaggacaactctttttttttttttttccattttcttttttcttcttcttggttttctgcgacagggtttctctgtgtagccctggctgtcctggaactcactttgtagaccaggctggccttgaattcagaaattcgcctacctctgcctcccaaatgctggaattacaggacaacccttataaaggcaaacatttaattttggctggcttacggtttcagagataaagtccattatcatcatggcagaaagtatggcagcctgcaggcagacatggtgctggagaaggagctgagggttctacatcttggtctgaaagcagccagaagactctcttcagcaagctgctgggaggtggctctcttctgcatggcctctggtggtaacaggggcaggggacatcgacacagaccctggctgtgataggaccatggacccagccatggcaacagcatgggcccagatgtcccagtggccttaggtggcagtgcaggccactcagcacagaccacagacatgtgcttggcttttggtggtaacgccaggcacaggtttcaacacagacctctcatgcagcagacccagacacggtcctttcctagaacctctccatggcctcctcatatccgcctgttccttaccaccatcaagtccccagtttcatctttatctatagtatatgaacctctctgcttcattctctcccatcttcccactgtgtacaccagctttcccaatttttccatcacatatttgcccataataatgtggcacttggagcaagctcttgcatgtctttcttctggctggggtggccacttgggtgtttttcttctggctgttccaggatggcctggcttgagtgggcatttgggtgaatttcttccaccctcctcaggccatagggaccagggtgggcatctttctttgggctaccccaggccagtgggaatcaaatgggctgacttctagatttatttatttatttgtttatttatttttttgtagtggtggtccctgagagctctaggggtactgggtggttcatattgttattcctcctatggggctgcaaacctcttcagttccttgggtcctttctggaggaccaatggggaccctgtgctcagtccagtggttggctgagagcatctgcctctggatttgtcaggtactggtagagcctctcaggagacagctatatcaggctcctgtcagcaagcacttgttggcatccacaatagtgtctgggtttggtggttgtatatgggatggctccccaggtggggcagtctctggatggcctttccttcagtctctgctccatactttgtctctgtatctcctcccatgggtatttttgttccctcttctaagaaggatcaaagcatccatactttggtcctccttcttctagagcttctgtggtctgtgaattgtgacttctagatttttaaacattcatctgctaaatactagtcaaatgtattttcatctttaagtctgtagaatttagagctttcatttcagtgacaatttgttctggtcttcatgtccccagctccccaactgtcttcttcaagcttatatttttcactgtaaatattatacttaaagttacccttttaaaggtgtataacaaatttcttaacatttttaacaagtgttatctttaaaatttttttttatttcttacaagcttctgaaatcttcatatctaatttatgatgcatcaaagataatttatgtattaggtttctgttctactcctttctgtttttgtgacaatattttggcaaaaagctacttataggaaaatgttttactttagctcataattccaggttataatctgtcactgtgggtaagtcacaatgacaggagcttgaagcagcttattacactgtatccacagccaagaccagagagaagtaaatgcatgtatgttcatatgtgtatgttcatgcgtgtatgttcatacgtgtatgttcatgcgtgcttgcttgtgttcagaaacagaagcatgttcatgcatagctcaggatttcctgcccgtgtgtcagtgcctaaagcagtgaatggagttaagaccatccgccacagacatgcttccaggctaacccagagtagactgttctccactgagacactgttcccacgggattctagcttatgtcaggttcatagttaaagctagctagcacagtctttaaaaaaaattcccttctttaaaaaaaaaatgtcaatggtgggcttgagaggaggttcagtgtttagacagcagcttctcttgtagagcgcctgggttctgttcctagcacccacatgatggctcacagccatctgtaactccagtttctaggggtcagatgccctctcctgacctttgtgaacactgggcactcaactggcacacatacatacatgcaggcagaacgttcagacgcataaaattaaaaaaaatagctaaaaaataatctaaaagattttcagtattattcagacagtagattgaatatataattagagatttaagaaatgcatttattatattattttatgtgttttttcccctactctagtagagtgaaagcatcttgcttaaggaaaggttttgtgccatatttatctttatattcactcttaacttaatgcatttgaattttatacaactaggttaatgtctatgacattgaaccttgagcttaatttttctgaactgtaaaaagtcaattaattttggaaatactactttacaaaaatgtttacattgtcattgaaaaatttccatcctatctttatacacatggaacttttgcctgtatatatatatgtctgtactccatgtgcggtgtccttgcagctgagaagagagtgttggattccctggaacaggaattacagttggttgtgagctgctatgtggatactaggaatcaaaccctgttcttctggaagaacatctcccagcctcattgaattgtcttttaaatatcacgtgaaaatttttctgcatataaaaatcatatagggctggtgagatggcggttaataacactggctgttcttctagatttccgaagttcaatttccagcaaccacatgatgcctcaccatttataaagggatctgttgcccccttctggcatgtaggtgtacatgcagacagagcactcctacatttaaataaatatataaattaaaaaatatgtgaaataaacaagtgttctaatgtaagcatgttttgttgaaatttatgatgatgttttcctataggatataaattacagtgggctagattcatgtaattaaggaaatagttcttgtgagaggtgtaggaagctatctgttgtaatctgcgcttttcaggctttactccaaagaggaataataagtgtaagtatgacatttttgcttctttccaggatctcttcagtgaaaactctctcttcaagttccttaaaatttgttgtgaagtttctgggtagctttgatgtgttctctgaaaatcagttcttctgttgtcaaatgtctttagttcttatatttggaataaacataaatgtagctagatctgaattcagctttcatccgtattgctgacacactgagttaccctggcaagttcgttgtatcttttaaacagggataagaatatatgtctctttggattgatgtgtagatttaagtaaaaaccataatccagtgcttgataataaatagtaacatttttttcttattgctggtaataaaacaaattctgttaaatattattgctgtagttgatgcttctgaaggtgtctgtcctggaatacgagaatgacctgagaccactgttgccaacagcactgtggcaaagcgtttgtcagagtttggtcagcctcaccgttagtttaaggagttcagagctcctccgaggaaacagtagttctctcttttcttaaaatgggtcattttgaaaggagaattcagaatagttagtggaaatatgtagactcataactctaccatcactttagtagatacatcacaatataactgaaatataagatgaacacagaatagatttgacatctgttgtaaccatccttacccacttcaaaagcagaatggatatatagaaattatttagagcttctcagagacagactgtctgttaattattgctattattattattctgttatttcaaagaatgtggtaacatgccaatccttattatacataacaccaagtacaaactctgacagtagatcaatgcggcttgtaaccatagaaacttgtttcctctgaaaaactttacacttatgcacttaatacgagcaaatattatgtgaagaataaaaatctctgtgttagccttattctaccaagagatgttactactccctgttacagataatcagaatagaattatttgggaaggaaagttttaatttacatcagaaatcaagagttgatagaaaataccagtgttgaatagaaaatttaaattacttacttcaggtagaatatttgcttattcaacatggcaattttcattatcttaacatataaaccttaattattatactttaatcatgaaataattttaaactaaggcctattttagatactcattgttctttccttttaattgttttaattttttttgataatttcatatgtgagtactgtatttacaacaattctgtgcccatccccatctctttttccccatttcctctcatattcatgacctcttcctctttaattattgtttcatttatatacatgtatatacagacatgtatatataaaagcaacttgctgagtccattagcgtttcttttatgttatatgtttagggctggtgatatgggattgcgtaactggctggagctcatccctggaaaatgctaaacctttctctcagcagccatttcttgtagcttggctaggaaaggactgtgtgagattttccctatccaccttagcattgggcagccatattgctgagatttcacaggtgccccttacacagcctttctttgccctcttgtgtgatgttccttgagccttaggtgtaggttgtgatgtagattcatcactccttgctttgttctctgttatttccaacagttttgcctttctgtaatggactcttacctgctgcaaaaagatttacatttatgtgtgggtattaggataaattcttagaatgcagttagaatttattctggtttaggaaagtggtaagagcagattctcctccagggtccatcacctcagcagtcccaggccattttttaggtttatagtagtgggtgtgaatttcctcctattgagtgaatcttaagcctagtgaagtggctgttgtttactctcaagatatgagtgccactattgcaccttcggggaaatcatgccacgtggtcattgtggttcgcaggtcttacatctgggtaggacgactgcttttctcctttggcagtttgcagcaccttctgatactgtgagaagtggttttcaaggaggaggcttccaggtcctatccagctggatttctccagtcgtgtgtctcaagtgtgctgtgtctttagcaacaggatcttcccttcaacttctggaaggcagccaagggcagttgacaatagtctgtattgttttgggagtctcttggttctggcacagctgactttgtattgcttatgtttttggggatggaattttgtagtgatgccatcaccttttctttgataggtgatggcatttctttgatagaaaaggtattttataaccagagttcattgctaattattggtctaaacaggtttaattctccatgagtcagttttgcgagttggtatatgtttaggaatttataatttttttccccagagttttctggtttggggcatataaattataatattctcatgatacttttcattttagacttctctgttgtaatatcttcatttttctaattttcaactgttttagtttttctaagggtcttaaaattgtctactaccttttcaaataaccaacttttagttttgttcatcttttgaactgttttcctcgattgtgtttctgttgaaatctttactgttttttcttctgttattactctccttttttgctaacattaaatcatttacttagtgatttttaataattgttaactactagcatataaaataacctttcttttgacatgtttttaaagattaatttaaattgtgtgtgtgtgtgcgcgcgcgcgcgcgcctgtgtgcacatacatgtgtataaagggagtgctggtgcccttggaggccagaggtggtgtgctggagttacaggtggttgtgagctgcccaactctaattaactctggtgctctggaggaattgaactctgatcctctgcaagagcaagcttgtcccctttaaccactgaggcacttctccagcttttactgggatgttttatacatgcatatcattatactttgatcagttttgctcctgcctaccctggtctcttctcttttgccggtctgctgcttctttcagatagctctactgctttcatgtcacatgtattttttacacttttgttcctgcagtacccctcgcctctatactggacccactgtctatatttgaatttaagtccagacccactgtctatatctgaatttaagtccagattcttcatctgagagaaagcatacactcttcatctctctgtgtctggcttatatcacttaacactttcctgcaatgttagaatttttattatttctcacagctgactgaaattctattgtgtttatttataacattctcttcatgcattattctaccactggtgtttcaggtgtgttcctaaccacataaccacgcctccagcctctctttcaggtctaccacctataggactatgctagcttcaggcagggaatatttgcattcaaaactcaagttcatgttttaaatttctgctgcaatagtttttttttctgtttcattacttttttacttcatttcaaattttaaagttttgtttatagtgtctagtagtattttgctgagaacttaataaaaaaaatccaacaaaacaccatatagtgttacttatatggttttagtcttaaaggtcttgaaatcgcttgagaatgaactgacttagtcaaaagctttttgtaagtcaaattgtcttattttaagtatttgagattttagtttctaatttataagtaaaacacttaattaacgtaaatttaatgggctcagtagtgtaatcatagcagtgactgatcctttttctgcgacactacattggtaatatttggttactctagcttttaagtttacaattcattccttatattctgatcacttgtcctaggttattcttactcatttttggtgtcactgtcacttatctgagttacctcagttgtgaatcccttgcattttaactttgaaactgctcaagatatgccttcaggaatagagaatagtattatattacactttctgagatttaactaatatattccgtgtgtgtgtgtgtgtgtgtgtgttgtgtgtgcaggtgtatcaaatttgctcatgttttaaaaggaagtattgcagaaagtcaagatggtattttttaccctgtcttttaagtaatctattgttcacataggtttgaactcttccaggctaaagtttttatattctctttcatatgtattttcttttgtatttaaaaaaatgttaaaagttttattcttaaggttctgtaaggcaaagggcaaaacagcaaccaacagattgggaaaagatctttaccaatcctatatccaatagagggctaatatccaatatatacaaagaactcaagaaattagacttcagagaatcaaataaccctatcaaaaaatggggaacagagctaaacagaaaattctcaactgaggaaactcgaatggccgagaagcacctaaagaagtgttcaacatccttagtcatcagggaaatgcaaatcaaaatgaccctgagattctacctcacaccagtcagaatggctaagatcaagaactcaggtgacagcagatgctggctaggatgtggagaaagaggaacactactccattgctggtggaattgcaagctggtacaaccactctggaaatcagtctggcggttcctcagaaaattggacatagtactacccaaggacctagctatactactcctgggcatgtacccagaagatgctccaacatgtaataaggacacatgctccactatgctcatagcagccttatttataatagccagaagctggaaacaacccagatgtccctcaacagaggaatggattcagaaaatgtggtacatttacacaatggagtactactcagctattaaaaacaatgacttcatgaaattattagacaaatggatcgaacttgaagatatcatcctgagtgaggtaacccagtcataaaagaacacacatggtatgcactcattgatatgtggattttagcgccaaaactcagaagacccaagatacaattcatagaccatatgaagctcaagaaggaggaagaccaaagtggatgtttcagtacttcttagaagagggaacaaaatagaggagtaaatatggagacaaagtgtggagctgaaactgaaggaaaggccatccagagactgccccacctgggaatccatcctatatacaggcaccaaacctggaaggtattgtggatgctgggaagtgcttgcttactggagcctgttatggttgtctcctgagaggctctgccagaacctgacaaatacagaggcagatgcttgcagccaatcattggactgaacgtgaggtccttgatggaggagttggagaagggactgaaggagctgagggggtttgcagccccatggggggagcaacagtatcaaccaagcacccccctccacccccccccccggagttctcggggactggactaccaaccaaagagtacacatggagggacccatggctctggccatgtatgtggcagaggatggccttgttggacatcagtgggaagagccgcccttaagcctgagggggttcaatgccccagtgtaggggaatgccagggcaagaaggtgggagtgggtgggtaggtggtgtgggagcaccctcatagaggcagggaaggggggatggcctaatgggtttccggaggggagacgtggaaagtggataacatttgaaatgtaaataaaatatccaataaagaagatttattcttatcatagaaaaatttgtttttcttcttttgttctttttctgagataaggtctttcagtgcagccttctctgtcctggagcccactgtgtagaccaggctggctgtgaagtcacaaaggagtgcacctccactctgaaactaaaatttgtttttacctcaacattttaattattttgccagcatcttacattttaaattattttatatagataaaatttgttaatctgtcctaatctttatttttcttggttttgaaccttatttttttttttttttttggtttttcgagacagggtttctctgtgtagccctggctgtcctggaactcactttgtagaccaggctggcctcagactcagaaatccacctgcctctgcctcccaagtgctgggattaaaggcgtgtgccaccaccgcctggcttgaaccatttttgaaatacattaacaagtagctttgggttatgtttgctttattacacattggttcattatcattttaccttttatacattgacttacttaatttatgcaagattattcttttctcatattgcacatatagtgttgaaatttcctttttcttccaaagtcctttggagagggaaacttattttcaaatttaagttcagtctttttttaaagtgcctatatcatacaagattacatataagaatatatttttagcctattagattttaatttaatgtgtgccatgtgttctctaagttcatttgagtcttattagaaatgaatataagggctggagagatggcttagtagttaacaagactgactgctcttccagaggtcctgagctcaattcccagcaaccacaaccatctgtaatgggatctgatgccctcttctggcgtgtctgaagaaagctacagtatactcatacacataaaataaataataaatctttttttaaaaagagaaatgaatataatggcatttctgttttgcagtggtcccaaaccaagtaggacaggtgacgttcctgcaaaggaggctgcatgtgggggacagaagcagggtgatgatggaggagtcactcctgagatggctgctcctcatcctaaaggttcgtgactgctagagacgaagtcagacttattgtatttacaatgatttttattatgaatgtttcatattaacattgaaaggatatataaaagtaaatgggagttattggatacaaataaaattgcataaatatctatttagatacctaagtatgtatttctttctttatttgtggatcccaaaagttaagtttgaacagtgttttgtgtgtgtgtgtctgtgtgtgtatagagtgaaagagtctgtgaagttaagttggtttggctgctcaaattgttgttttcatagatagcaatatcactgttacctggaattttagtacacccttcccactgcttgcttgcttgcttgcttgcttgcttatttatttatttatttatttatttatttatttatttatttatttatttattttttggttttttgaggcagggtttctctgtgaagccctggctgtcctggaactcactctgaagaccaggctggcctcgaattcagaaatccccctgcctctgcctcccaagtgctgggattaaaggcgtgcaccaccactgcccaaccccattgcttatttttgtactataaattgcattccttattggttagaacttattgtaactttcaaaagatttttacctaagccaattttagaacatatgaaagtcaatacatctcagacttgtaaaatttctttgtagatctcttaatgtacataattaatgatgttatgactccttccctttaatttttaaaatataactacaagtttttaaacaaaatttataaaaaaactagtttactaaacctggtccctgagatttctctggtactgagccaccaaccaggcagcatatactagctggtctgaggcccctaacacgtatacagcagaggacggccaggtctggccacagagagagaagatacacctaactctcaagagacttgaggccacagggagtggggaggcctggctggatgtgtgtgggttgttggggtggggtggggaccggggaggaggaatggaatgaggaactgtctgagggcagaatgggaggggggaaaacagcaactgtaaaaaaagatgaaagataataaaaataaataaattccagctactcaagaaaaaaaaaaaactagtttactatctttttggtttttgtacttgcctcttttcttttcttttttttttaattggatattatatttgtttacatttcaaatgttattcccttttccagtttcccctttgcaaccccccctcccatcgccccttacactgcttctatgagggtgctccccccccccaatcctgcctcattgccctaccattccccttcacaggaccaagggcctcccctcacattgatgccagataaagcctcttcagctccttcagtccttcccctaactcctccattggggtccctgtgctcagtccgatggttggctgtgagcctctgcatctgtatttgtcaggctctggtagagactctcaggagacagctgtatcaggctcctgtcagcaagcacttcttgacatctacaatagtaactgcatgtgggatggatccccaggtggggcagtctctggatggcctttccttcagtctctgttctgctctttgtccctgtatttcctttagacaggagcaattctgggttaaaattttggagatgggtgggtggcccatacttcaactgggggaccatgcccaacctctggatatggtctccacaggttctccctcccctttgtgggttatttcagctaatgtccttcccatgaggtcctaggaggctcttgctttcatggcactgggactttctagttgctaccctcagttccccattccccattgctatacacctctgttcaatttcttaaccctctgtacatctcctccatctccttccatacctgattctgtccctctttttctcctcaaacgcttctctttctctcaagtccctcccaccctctacttctgtggattattttgtttccccttctaaataggactgaaatatctactactttggttttccttcctactgagcttcatgtggtccatgagttgtatcatgggtattccacactctttgcctaatatccatttatcagtgagtacataccatgtgtgttctttgagagttacctctctcaggatgatattttctagatccctccatttgcctgtgaattttgtgaagtcattgtttttaatagctgagtagtactccattgtataaatatactacattttctgaatccattcctctgttgagggacatctgggttgtttctagcttctggctattataaacatggctgctatgaacatagtggagcatgtgtgtgatggggtgtccagggtttgctgtggtgggagaactgggttctgatgatgcccaagtagccttggtttctgttgcttatgttcttacacttgcctgttgccatctggttatctgtggtgttagctggtcttaatgtctctgactgtggcttgttccttctgtaagcctgtgtgtcagcactcctgggagaccagctctctccaggcggaatttctgtatggagagctgtggtacagggtcagctccatgtgcagatggtaactggaatgatctagtttactatcttaacttgtgaaattaacacctttgaggtctcttggattgtggatagcttaaagcaggttgaagtattttgttttctaagtaatttttagactatccacaagaaaactgttctttattcatacttcatgaaaatgtatttcatttcaaatataactattaaaagattgtctgtccatctgtctctgatctctctctgtgtgtttgctgatctcacttattattttctgtcttattcctttgggacaggcttttttctgtaaacccagagctggcatattttgcctggactggcagtcagtaagcctgagcgagcctccttcccctacccgccttgagctgaggaagcatgcaagaccattgctaaccttcaaatgggttctgggattgaactcgtgtcctcatagttgggcaacaagtcgtcatggccagttagctttctctccaacccatagaatgctttcttagtagacctcatagaaacaaaggaaactagacttaacttgtgtgtgtactagaagccagctgaggacacttactagagaaggtcttctgttttatagaggcatgcttccacacaaccactgagaatgttaatatataatggaatcatttatttcttatgaactatatggaacttgttggcatagttatttatttatttatttatttaatttcagaaacaatggtaactcaactgctgggtgcaacaactagaatcataatcttgtaagccatattaactctaaatcctctgctactgaatcctggcagattcgccatctaaactgggagacactagtggctatatcttgttctctttctgtccctgctaaaagcccctatctctctcctgcctactctcttcctctctccaacctggcagtcccccccaccccccaaatgcccagtgattggtctctttattccttaggggaaggttcacaagaagtcacctgagtacacgactcattcctgagtccagagagcccttcccaagaaatcagaattaacatcaaaatacaaacagcaccagggccatccacagcacttcccccattcggtccactcttttatttcagatataaataattactaccattttgtaatttataaagtacaagatagacctaacaaccagtccatcatttttgtcatttaaatagaacactctgtcatctatcctaacttaaaagacttacaattctacacctgatgtatgtcctggtttaacttatatactatctgaaaactatcttctcaaatatgttctctcaatgttaaatagcctggtttggctatgaaactgtaagtagtctttcaaccctgtcagaaatccaagagtgaccaatgctatctagaaatataggaagcctaacacagcttccagaactgagacaaatttcagagacagctgcctccccaaagtaagtcaggaagctggagcatcagtcttcagccttctggcccaggatattctgacagaccttgaaaaacaggaattactaaggactagcttattctatctcagcagaactaagctgtcctaacctgtaacttgtgtcctttcaaggatggtacaggtctgcaggagagataggcaatttctgcccagtggccacctagccacaaagtactacctcacctggaggtagagatgctcagctgcttctttgattccatgaatgggaagctgttagaagcagataaatctcaacaacaagtgaataaataacattaaatgtcacatctgtggattcctgatgtttttgaaaaccaactatttatgtaaagtaatctggacttttgtctgttaactaccctcagctatttataaataaaatatctgaaaacaccctatcaataaaatcagagccatgaattttctatctggtccttaactcataggcttaaacatctcagatcagtttataataacagttaaagaatgactgggtctaagcctcgtacttttaaaaattattgaatcaatagaagaaatttatcaatgaaaaccttgattctgcatcaaaatacattctataccaaaataagaaattacgactttaacttagtaacaattataaggatttctaccatatgaggttatggctacataattctagcaaattcctccctgttccaattatgtccatttctaaattccctagaaaggcaaccttagagtaaccacctccagccccaaagcccagggaactgggacagtgagtctttgtaacttctttaagctgaacatgagcgttgagatatcttgaaatggggtggaagagtagggaaaataggggagttggttggccttaagaaggccacaccaacgattgtgttagtctctgatgtctgtctgtgtcctgactggatctggctggaagcccaagagatcaggaggtcaagcaggtcagttcagcacatctgacgatgagactcaccaaggttggagattctgtaatacacaaatctcagaacaaaattttagtaccatcaaggtaactttttttgtttggttctctggaaactagttcttcagggagtctccctttatcatatctgatccatataactctggaatttgtatagacactaattgccttttctaaaaacataaagacaaaatctttttcccaaatcagtatatccttgagccagtaacaagaaaaacctttattttgctctctctcccagagaagtactataagcacaaaactcaaaatcatactcattttgaaaattaaaacaatccaaaacaaatgaagtaaactaaaatactgtatgtgcctattcttaagctttttctattttgctgtgcaggataataacccaaaattcccatggagcccatatcagagaatatgagttatcttgcaaatctgttataccatctttaaaacaatttattcacagttctatctatacctgcttataagcaggtagcttgtctttttgttgttgttgttgttttttgtttttgttttgatttttcgagacagggtttctctgtatagccctgactgtcctggagctcactttgtagaccatgctggcctcaaactcagaaatccgcctgcctctgcctcccgagtgctgggattaaaggcgtgcgccaccacacccggctaggtagcttgtcaaaccaggatttaaacccaaaattcccttggagcccacattagacaggatttgaatgtccagtaagacttattagagcaatatatctttataccatctttaaagcaattaattcaaacttttactaatatctgcctttaggaagcagatagtttttaagctgcctgcctagagcagtcatcctgttataccaatccatctgttgagctctctgtctggagccaaagacatttagtagagagcgcatgtaattaacactgtgctcgctacttggagtcagtgactaatttgccctgtcctagttccaaaccgcgggtgaaattccccacatgatttggacaaaatctgtatataaatctatcctaaaagccaataataccaatattataaattcacagttaaatcaatatctgccccaagatataggcgtttccattctctggctcgccgactcagagccgccatcttgccccttcccgcagctggggacctcagagccctttttctttgtttcaaggttcccgcgcttgagtccatgtgactcatcccagcactaccttgctctcacttagaaaataaaactctaactctcaggctaataatcttacatttctagtggattcttgcccaacatgttggttcgccacctcgtgcgcgaaataataaaaaaacgaatccatactattgccggtaaggcaccgatgggcaatggagactctgcctcagagctctgaaatctctccacccagttctctaagtacccactggcgggtcattaccatgccatcccgatgcttcagaactcgtacattcttttggggtgcacatcaggcaaatccatgctttgcggccatacctttctctctagaacccaggcgagcagccgcatgaaggaaaacaccacacaaacttagttcagaaacaagggcgactcagtcgctgggcgctacagctagaatcctaatcttataaaccagatcaaatctaaatcgtctggtggtgaatcctggccatctaaactgggagacactagtggctgcgttttgtcttctctctgtccccctccaaaagccagtatagtattatttacatgctcagctttaaagttgattgttgaggcttgaagactgaataaaatgtattgactttagtcaaaaatatttgaaactggctgagtatcattttacatatttaagattttgtgagtaatttggtgtggtatgggattctctctagttccagatatttctgttttctggagctctttctcttgtttatattttgtttcaacttcgtccactctatcttagaaactctagtaggctagagtttctaccattttttaactttattttaggattctttaaattttcttttgtgttttagtatttcattgctctaaggagactccatgaccaaggcaactcttataaagggcatttaattagggctgggttattgtttcagaggttcatccagtatcatcatggtgggaaacatggcagtgcccaggcaggcatggtgctaaaggagttctgcatcttgatcctcaggaagccaggaggaaaccggatttgatttcacactgggtatttaagacttcagtgccctgtttccaaagtgacaaacttactctaacaaggccacacctcctccaataagaccacacctccaaatagtgccattccctacggaccaagcattcaaacagatgagtctatggagtcatacgcgctggaaccaccagattctggatcagtgcaattaacaccatactataagatgaccaaattgccagaagcagtacacagattcagtataatcaccactgaaattcagtaaccttcacagtatcagaaagtaactcgaaagtgttaatatggaaacacaaaagatggctaaaccaatctcagtaggcagaacactgccaggaggtatcataatttctgacttcagattatacaacagtcatatgataaacactgtggtgcaacatgatgctcccacaaaacagatgcgtagaccaatgaaacataatcaaagacccagaaataaacccatgtagctgtaaagaaaaatcataaaattttccagaaaatggttggctatggatattattttaaatgaggtataaaagtctcttgggttctaattgtgattaaaactttcattataaaatacattactatatatcctaaataaaacaaatacaaaataataataaaaagatagttaaagaaatagatatattttttctgataccagtttttaaagcttttccacaaagccattttaaagtagactacaagtatagtattccttttgtagagaaatgtctgccttgtgggttttctcttttactgtaagaatatattggaaatgcttaatatcttttatcctcaggagttttgtcactttttgaatttcatttgctagaaatattttccactttaaattgtgtataatatattagtagaacctaggttttatagtgcccagctctatataaaaagtttattcctgttttggcttgactcctgtataagtagtaaattatttgaatgtaggagtctataaaatacagtttttagcttttcctttccttcattagtcctttttatttgtttgtttttgagacagggtctcacagtgttgaccaggctggcctcgagctcacagcagtcagtctgcccctgcctcctgagtgctaagattacagctgtgcccacttacacctggctcttctaagtcttttactataaaacttttgtttagaaattaataattcgatatagcatttacgctaagaggttgttgatcttttaatataatcaatcttttagaatgtcatacaatgtattttgaacgtgcaatcccattcctcctcctctcctagatctacctcttctgaatgtccctgttctccatgcctcatttaaaatagattaatttactttctatgtatacagtgttctgcctgcatatatgcttgcaggccagaagagggcgtcagatctcatttggtcatgaggcactgggtggttgctgggaattgaactcaggaactgaacatactgctttacctctgagctatttcttcaaccctcatgtttcattttaaaaactgtgcactgacttcaagttttactgcccacaaactcatatacctgacttcttaatgatttgtaataattaacattctttatgttttaaaatgtattgtgttgataattggctgattttcttgggaggaggaatagaatagttttcatttttttattcttttaaattggaaagttgaagccagtaattttttaatgaatataagttgtgactaaatgttgcttgctttgtgatttggttatgtaaaattagagttggttctcatgatgatgatttagaaaataaaataatttaaacccttcattaaaacatattggaagatatttttgtgcagcgtatattgttaaactgaaattcaaaacattttagtggtgattggcataggcttccaaaatgatgctttttacttaaaaaggaagttcttcactgcagaatggtgggtttactgggtgcttagattgggagagttttgattaaaagaagaaacaaaccatcaagcatatttatattcttgtaaatgaccacattccagagagagttgttgaggaaagacagtttggcttcttttcaaagaacagcaatcataattttactcttaattttaatgcctttacttttaagttaaaaatattgtgaccagttttaaaaatagtggtgaatcacacagacttttgttttttagtttaatgtattttaatagcaaacttacaggaacagcacagaagacagacaacattaaaagcacatacttgcatgcaggacaactcagttagaaaagtatggtgagaggatggaaagtattggatgataaaaatgatacagaccatttagttgccgtcaataagagatttacttatttaaaaaagaattcaaatgctggcattgtccaggaaattctaacaggtttatttataattgttataaagttgaactgtgaaatatgttcacggaaacattttgcttgcattaatgctttacatcttgcatttatattaaaaattcacacacaaatgtacgtggagaaactgccaatacctgattctgccccctatgtttccactcgcaatcatatatgtaggtacctttgacccccatggaaaaatttctaacattcagaactgataaccggaagaaaaattcttttgagaatgaaatgtttcccctcagtgggctcttaagcacgttctcctcatacgcggcgtgctagctggatatcttttggcataatggttacacgtttggcatggatagcacacaggttgatatcttcaaaaaggccaaccagataggcctcacttgcctcctgcaaaacaccagtagctgcactctggaaacgcagatctgttttgaagtcttgagcaatttctcgcaccacacactgaaaggggacctcccgaatcagaagttcagtggatgatagcgtctaatttcacggagtgccacagtacaaggcctgtagcaatgaggtttcttcacccatccactagaggatgcactcttgcaagtggcttttgtacctagttgttttctgggtgctttaccgtggatttgcgggcagtgtgctttgtatgagccgtggtctgggcatctctttccttttttttttttaatttttattagatattttcttcatttacatttcaaattctatcccaaaagtcccgtataccctccccccgccctgctcccctacccacccactcccacttattggccctggcgttcccctgtactggggcatataaaatttgctagaccaaggatcctctcttcccagtgatggccgataggccatcttctgctacatatgcagctagagacacgagctctgggggtactggttaattcatattgttgtttcacctctagggttgcagaccccttcagctcttgggtactttctctagctcctccattgggggccctgtgttccatcctatagatgactgtgagcatccacttcagtatttgccaggcactggcatagcctcacaggagacagcttatcaggttcccttcagcaaaatcttgctggcgtatgcaatagtgtctgcgtttggtggctgattatgggatggacccctgggtagggcagtctctggatggtctatcctttcatcttagctccaaactttgtctctgcaactccttccatggatattttattccctattctagggaggaatgaagtatccacgtgggcatctccttccttaatcccccttctcctcctgctggagctctgcgatcgagaggcaggcgctgagggaatggcagcagcgtggtgaaggctgtaaataccctacacagacattttattttttattttttattttattcagcccctggaatatctctgaaatagaccacattatagaccacaaaataaattttatttatttacatttcaagtattatcccctttcctgatccccccccccccccacgaaaccccctttcccatctcccctcctcctgcttctatgagggtatgcccccattcctgcctccctgtcctcactttcctcaagggaccaagaggctctcctcccattaatgcccgacaaggccatcctttgctacaaatatggctggagccatgggtccctccaagtgtactacttgattggtggtttagtccttgggagccctcaggggcctggttggttgatattgttcgatctatggagttgcaaaccccttcagctccttcagtcctttctctaactcctccattggagactctgtggtcagtccaatggttggctgcgagcacccacctctgtatttgtcaggctctggcagagcctctcaggagacaggcataagacagattttccatattttagtaagactctttaatcccagcactcaggaggcaggtagatctgtttgaggccagcctggactacagagagagtttcagaataacctggcctacatagaaaaaccctgtctcaaaaaacaacaaaaatgtatctgtaccaaatagaaaaaaacaagacaaaagaaaacaaaaaacatggttagttgttttattttcattactcaatgaaaggatattttcttcccatcaaatttgtaacatgtctttcacatctcttgtctaaagaacagagccagtttatagcgatgtaccttttctattttcactcagtgtcactatagagctttggttaatgagcagtatagtcagtaacttcggtgctactggagactcatgtaagaggggatgttgtgtgctttttgggtataactgtgctttttatgtttttttttttaaagactttaatactggaaataaaggttgtgattatcttgaagaggggaccagcaacaagaatacttcatattcttattcggaaatggaccatactccagtttccaggaagagaaagaaaaggggtagaagtaattttcatgattctcataattctaagacttctttggataagccaacagaacatacagtaagtagacgcatttaaatgtcgtaggaaatgatcttgtgttgtgataaaaatgagttaactgtgtctctgatttactggatttctttcatttttttctagttctgtgcagactttatttttaacattttaaattgtattacatttattttattctgtctctgtcttctttctgtctctctctgtctctgtctctctctgtctctctctctctctcatatgtgtctttgtctttctctgtacatgtgggctccagcacagtgagtgtttctgtctctttcttttctctctctctttctgtgtgtgtgtgtgtgtgtgtgtgtgtgtgtgtgtgtgtgtgtgtgtgtgctcactgtctttgggacttggtttcttccttttactctgtgtgtaccagatcaggttgtcaagcttggtggcattcacctatacctgcttagctatcttgtcagcctatcacattttattaaaaaatactaaaacctattttcagaatgcataattattggagcaaatccaaaatattgtatattatttaaaaagcgcagctgcttttatcaaatactgtttttccccattttagctgaaccaaattcacttgctctgtgaaattactttcagactttttatcattagcacatatttaccatttttgacatgtttaaagagaacttattaaaagtaataatttttggtatgatacttctctctcttccttcctttctccctccttctctctccctcatttccttccgtccttccttctttcctcccttcattcccgtttttcttctttgattttggttatttgagatagggtttctctgtgtagccctggctgtcctggaacttgttctatagactaccctgatctcaaattcacagagctcagtctgcctctgcctcccaagtgctagaattaaaggcataagttaaagttaaaggctacacaccacctatttctaaagatctacttgtagaatattattatacctataattataaaagattataaaagaaaaattataagtgatttgtttatttttattttctgtgtatggctgtcttatatgcatcctcttctggtggaaggacccagtgactctccctgacctgtcacatacttgtagctgtgttttctgaactcatacagtcaccacttcagatttttttttcctacagtctagtaattagattctagatcatgaggttttttgtcaaatgaagaaaattgaggcttattcagagtagatgcttgcaagaaaaatgtgttacattcttttaggaaagagaagaggcagctttctgattccattgaatcataagtcattcaggatcctatagtgtctctgggttatttagagttataaggaagtaataatgatgttgaaagcaatgcttttcataattttttatgttaattcttaggtttttttttttttttttttttctaaaagcaatgttttgttactacttttggaaataaaaatatttaaaaaccccttctcattctaaatttacttagctgtgatatatgagggtccctccctccctccctcccttctttctttctttctttctttnnnnnnnnnnnnnnnnnnnncccttctttctttctttctttctttcctccttcctttctttctttctttctttctttctttctttctttcttgtagtcctagctggccttgaactcaagagctacttttgtctctgcctcctgtgtgttgtgtaccaccattctctatggaaattttctttcttggctctttaacaattatttaggcaccatattgaatagatcaagttcggtatcatcatacttgggtgcactgccaagcacatttagtatagcttgtagctatctgtctatatacttataaaaacaatacatttttgtgttattccttttgagtctaagccataggaaaaccaaatggaaaaaatgtaatttctttacttttaaaacatcgttcagaaagaagaagaaaatgactcttcagtctcccgtaagcttgaagagtccggtgaagactctcaccaggacccagcaccacccgaaggactcgcgccagaatctttagagagcgaggccactaacctgcgctcattcgctgctggtcaggagccagatgctagcgctgcctctggaagggcctcttcacccaacaaaagcttggagagctctgcttctagtgaagtgtcggagaattcttccgtggctgtgaagggtgaggcgttgactctaaaagaagcatcccctccgggtggaagcagtgaagagagccagttgttgatctcagctgagccaagtaagtaaaagaaactgtaaagactcttcttctcaaagctgtactcaaagcttggtttctctcggattttgctcaggcagtaggatgcttggacctctgggaaatgtagtattaacttaggacaaacatcctcagtggttcccttataaacctcataatactgatttggataggtagatagagtctggaaacaggaagtcctcttattttaagtgtatgagtgttttgcttgcatgcatgtatgttttccacatgtatgaccttagacaccaaatgaaggcatcagattccctggaactggagttccagatggttctgagccaccatgttgttgctgggaacagaactcagggcctttgcaagaatagcaagtggccgtaatcagtgcactatctctccagtcctcagagtaaaagaaaagagtaagaaaagtgtttacaatggagtaacccagtaattacaaaaatgcttctcggaagacagttattattgtgatgtcgttgaagtggagttttaatgcagtttggttattgtcattaattttgatgtacttaattctaatcatagtcatttgctgcaaaaacccagaaatctacagggaacacaatgattgtatctttatcttctagccatttattcccccttcttcaaggaacaaatgtgacttagggcacaattcagagtgatctcgaaatacttagttagaactagaatttctaaattcatctgttaattctaacactgaaacaaaaaacctgctataattacttaaaaactgcctgggctgggaatatagctcagtggcagagtgcttggttagcatttatatgactcccaattcaatcttctgcacaaaagaaagagaaaggaaaaggagagaacatataaaatgttgattttggttcatagttgaaagagagaggtgaggaaaagattaattttggcttaaagttatgtaggcttcagtccaggatcgggtggaccccgtgctttgggcctctattggatgctctggatagcaggcaatgtcaggaagcacacactagagtgaaaccatgcatttcattctcagggagcagagggaatgggctgggcagacaactccatgtccctttctgaaagcctcggtgactgaaggatgtttagtgacctgaggattgtccactgctaggccccaccccgaaagctccacttcctttcagcagtaacacctacaggaccaagcacatctctgaggacactcaatacccagagtgtactgcttacatacagctttagtcgtctttacatacctttattctttagaatgtaagaccataggaagctgctgtataataatgctcatatggaatttgtatgtaactgctactaaacatcatgaaaaataggctagacttaagttgatataaatgtatatatataaatttaatgtgattattaaagataattagttagaaagttcttttctttttaagtcattattgtgacacatttaaaatacgttttcctttttagttgtagtttccagtgatgaagaaggaccggttgaacataagaattcagtaattctaaaattacagcctcctcatgagattatgagtgaaaatcagggcacttctgacccacagttgtcagagctgacactcggtgcatgtgaatctgtacaggtgggtaatttatctctgcctcttcatagggtagcagggaaatagtctaaaagcgtttgttttgtctcattatcaaagggtaaaacaactattattacatgtatttgcttatctgtgtgtactgcgttgggatgtgaaagccatggcacagttgtgccctagtttcgtgtctccattatgtaggttccagggattgagctcatgtgcttggtctcagtggagggcacccttacctgctgagccaggattccagcccccgggagaatagtcttattggctaatagctgttgctttagtaagcagaatatgatgataaaaattctgcagtccctgagtatgggctttataacaactttcctattcattttagtgacatcttttttttttttttttttttagtgaatattttcttttccatggttctcattgaactataactttgctatttgtctattcttggagtaacatgtctactttagattatgtcttgtcctcacataatgacctatcttcaaatatagaatttataataaagtatatagacctgatgtaacagagggttcttaagcacttagctctctctttaaaaactgtttattttgtgtgtgaatggcacgtatgtggagacctgaaacttctgggaattgttctttcttttcacagtgtagattccagggaccaagtataacttaggttatcaagtttgaaggctgagtcatttgctgagttatcttgtctggccatccatgtatagctcttaattgctaattaaaaacgcagtagcaaggagagcagagttagatccgagaggagttagggggaggagttgtgggtgattatgaccgaaatacattgtgtatgtttatgaaattgtcaaacaatatatagtattataattctgtatgaggactgttactgtgtcatatatgcagatggaagggttggaactggtgactaaactgagggcttttactgtagcttttgcagaggtataatcttctaggtcaaaagtttaatctggctttatatagaacaagcactgaaaacagacaggtgctcttgtcgtacgtacatcagtggctctctgtataaatgcagtgtcctgcggatgcacaacaaatactcatccaagaaagtggctcatgccagccagatgtcatctgttgctctttgctaacaaccctttaatttaaagctgattaaagtctctttcttttttttttttttgccattgaaaagtatattaaaacacagtagtaagattattatcttggttaatagaagcaattttgttttgtaaatatttgatctaaatagatagacctgagtttgggtcttagttttgcatcttgctgagtacaggaccacaagcaagttaacctaaccactccaaacttctgttaactttatttatgaaaggggcaggacagcctatttggtcagtagtcacagagatgaaaagatctgaaatatttaaaaacttattgtaaactaaagcactaaatctaaagttgtttctattgatttaaaagccaaatagagccagctagggaatagtgaattgaaaacagtggcagaaaagaatataattatgagattagtcttggtatttttttttttgttttttattttattatagtaaatccaaactcagtatcaacatttctgttggcttttctccctgactaatcagttattttggttatcttttttttttggctgttaaaaagaattccatagaaatgactgattaaacctaaattttgatctagaaaatcaaagcacttcatgccagccattaataaatattcaaaatattagtaggtactcaaaatctgtggccaaagaatagttttaagcctaataatcctatttttattttatgtatatgagtattttacctgcctgtatctcctagcaccccatgtgtgtctagtgcctgtggccaacagaatagggtgcctgatttctggaactcagagctgcaggtgattgtgggctatgggaatcaaaccttgatcttctggaaaagaagcctgaatcttacgtgctgccccgtctctgtagtctactaagtagctttcaatctaaacaagttgattgtaccacacgttactataccttgtagtttctagaattttcagacttgaacatagtgcttactgtagtagggtcagctcttccatggccctagcaagcatcacttcatgttgtaaatcatgtgctgtcttctgtgggaagcctcgctgatttctccaggcgattctaggtttctattacaaagctatctggtgaaaattttcagtatgcagtttaccataatataaataattacttacacatttatctctttcttccatgagacttacaaatccttgaaaatgaaaacatattccaacatttttattctctgtgatatttctgatacagtgaaaattaataaaaattttagaaagatattttacttgaattaaatctaacatagtcaatttaattcaacaaatacctatgtgtccacttgaatttccactgtttacaggtttaaaagagagagagaaagaaagcataactcttcatcctaacaaactcaaaggttaattagggagtttattcaagaatataaataaatgtaaaacagaataaatctggcagcagtcctctttgtgtttttctttaccctagtcactggctcttctcttccccattccctaaaccccaaatggtaagtaaacaaacttgtttgggtaatagtaaggtgagagagtggccttaaagtaggaaattaaggatacagttcaaaataggtatcatgtctgtaaacacatataaaatagcccataaaaattaatctcaatgttggtttcatttgtacatatgcacaaagaaaaaaacctaaaaatgtccaagattcatagttgaacaataaatgtaaaatctacattttattaaaaaaatcttattgactgtttttcttcttattaagaagagtataaaattctttagtcatttaaagaagaattttatctttgaacctaattttcagcttttctataattctttaaaatgttgcacttataatttatactttttaggtaacatctgaattatttccatacaatcctgatgtagaaaacatttcctgtattaaatctaatagtgaaatggatctgaaattggatttcatatttacatgtgtgtatattggtaaaataaaaggaactccaaaaggttgtgtcacggtaagtaaatcctataacattttatgtaaaaatctccgtaatatttcaccacatgattgccagagatgagctgaaagggataacatagacatgccaagtggacaaggcaggcccacaaggcctcagcagtacacagagagctacagacagcttgaaatgctgcaagcaggagatggagtcttctcaggaagagcccaccatttagttatctaataccaagtggtcagcccagaaagtgtacatacatgtaaccttgcacagactgagcaggttatatttagaagcatatgtgtatctatgtatacagataacgcatgtagagagcagtgaacagagaggctatggatttgaaagagaacagggaagggtaggtgggaggccttggagggaggaaaggaaggagggaatgatgtaattatagtctgctctcaatataaaagaaaaactttaaaaaatattagttaccattttttcactttaagaacagtgtaaagtttgttttagttaaaaactnnnnnnnnnnnnnnnnnnnncagtgtaaagtttgttttagttaaaaactagtaaccaaccaacacacacacacacacacacacacacacacacacacacacccctccccaaaagatctacaaacaagttaaaggaagaatgtaaaaataacaatttttcatgccaagacagctgctgctaatttggaatatatataattttatatacctcatgcgtacatacacacacacacacacacacacacacacacacacacacacacacacacgcacgcacacacacacacacacacacacacacacacacacacacacacacagagagagggtacagaggtacctaaaacagtattatgcattgttttgcaacttactacagctatgttaattcacttctctttccatttcgaggtgggtatcttttacggtttccaagtgtccttcatttcagttgtcctagtgttttgctgtaaatatcacttcagtatacagtttcatcatttcaacaaatgatgcttcaataaatgatacttaagttgcctgcagtagtgtccttttgtggtctcacttgcgagctgaggacagaggatcccggagctcgggagcttgaaaccctgcctcaaaccagacgaatttatccctgatttcaggaaagcagtttaataaatcaaagtaaatttatgtacttgaagaaaggctgagagaaattctataatatttagaattatgatggaagggcacgtagggagttctgaaaattataatcatataaaaagggtaaaagtcttaaaaatttctgggtcttccaaagatgttttatatgtactctttttcagacagagttcatgattctttgtaacagaaataaaagagcttagttttttttttttggtgggtaaatatattagataattaaatttagtccttcaaacatcagagttcctactatattagacattattgtgattaaggtaaaattttcactattatgattgatagttacagtttagctggattaggaaactaatggaaagttatgtaaattagagcagctttcttgagttgttttgttattgagtgtagcagtacatacactttcttttaaaattcagattaacacttgtggtagtaagaaaagacttctaggcacatgcgttgttcagagaactgctctggctgctgaaggatattcggtatcagcactgtagccagcgctagtcttctgcaaagagatggaaagtttccaggacaggctttgcttcagtatcacgttcttatcccgacatagctgggagtagaccctacacacgctgttatagtaaaaattcagattcttgtgcagtagaaggcgtagtagaccaagaatacgtgatggtgtggaaaggaagagagagtgcaagtgtaagcaagtgtaagcaagtgtaagtgtaagcactagagacatcactgcacagtagttctcaggaattttgaagtaatgtctgtataagttctggaaaagaaactaactttatattcattttctagaggtagtactttatatttctgagattattttctgagatattaagtactcagtaaaacatgtcagaatttaggaagggaagatgcataccatagtatgtatatatgtaaaatagttatataaaacaaacaatgtatatttgactacattaaattagattgtcttaattagatacggacttttgtgacaagagccctttgagtggggttattcagtgcttctgtgacagggcagtgactgacagtcacctccatcactgcagtagtacagacagcacaagcagcatttgaactgtaaattcagctcctggttaatttaccccattgcctcacattaggcttcactggccaacttaccctgcggaacatgagttttgtattttcaaaattataatatgaagtcatttttaaattaagaaaatcattgacttacaattacacctgtgttgacattggatactgtgacttgcccagaactcatttgctgtctatttcaattttatcttgtgtttgcaagttctatctctgatgtagtcaacagcttcatgaatgtcctgatcacagagaaacttacccaatcaactgtaggcagctttgttccatagtaaaggaaaagcagttgtcaaaaaacatgtgcggtttttgtcttcagagttataagtgtgacacttaggctggatagacacacagaagacaggcagaggaagtagtttaacaatgtagagggatcagaaagagcaaggatctcagtcacaagagagttctgagaagtgactggtcaagataaaagaggctgggcttctgcttgggtcctttggcaggtgcaaaggactggtttatgagacctttgtagccatccttgattaagcagctgagttttgttgttgttactccgtagaaaagacaatcctctgagcgcagttctggctagtctccaaaggctgaaggttcacagtgggtgatgacaatttcaatgttttattacaaagaactagtacattagtgctttgctttgatcagtagtcacttgtgagtttgggtaatccataagagaataatcacctttttttttttttttttttggagacagttgccttgggcggtctcctggcatttcttttggacattgtctttttccttaaaaattcagaacacacttttgagaagtaaggttttacccttttgttgttgttgttttgcttttcaagatagggtttctctgtagttttggctgtcctggaactcaaatatgtagaccaggctggcctcaaactcatagagatctgcctgcctctgccccctcttcccccgagtgctgggattaaagaggtgtgccaccactccccagcggttttaataatttttataaatgagtattttgatagttacttgtactgttaaggactcgtaaacaaccgtaagacgaagtctttacattgagatagttctttgcttttttctttttagtatttttactaagtactaaaaattgagtaatactagcccggtggtggtggcatacacctttaatcccagcacttgggaggcagaggcannnnnnnnnnnnnnnnnnnncctgtctcgaaaaacaaaacaaaacaacaaaacaaaacaaaaaaattgatcaatactaaatacttgaatactaagaaaactgaatagaaatatagaaatgcatttggaatagtaactcatattttgtttcatatttttctttagttcacaaagaagtatattaaaatcccgtttcaaggtaagctaccttctactaataatctttcttcactgtaactttgaggataaagtaatggattagaaaagttctgaaattatgtcacaaattttccatccatttttactatagaaaataagtaaagtgtagaccatttaataacgtttcatgttaacaattttagcagttccaaaaaaaacctcaaaatgttttatagtaccgaaagaatatattattgctttaatgactataaaccaagtataaagtactcttaatgactcttagaattaacaaaaatcaaagctcgacagacaaatattttgttacacatgaatatgattagggtaagaactaaagagaacagtacaaaaacatgtagtatatatctacaaagacagagtttttatcctctactgtatagtagaatggaaatctatcctcagcttaaagagacgcagactgtttctcgttctttccaaacaaaaaatttcagaataattagtgatggaaaataaatggcagagaataatctctttagagagtgaattataagaagaacaaggaagaaatatgtgggcgcataacatcagatatgaactcgggtaaaggaagcatcgttacagcaatgacatgtgtaattgaagcagcttcagttccttagctactgcacgtgcagaattgataaccctgatgtggtagcaagtgtaacagctggatcaccatttaagtattgagaatacaacaatttaatagtccttgctagagaacactcatatgtttatgaccttatcattaatgtagtgctgtccttgttcagctcatgtttaggtagtcatattggtgagacttcacaagtgtagtttctgatgtccttaggagacacagtgtcacagcaaactccctgacctctggctctttcaatttttctgttccctcttccacaatggtccctgagccttacgtcaggttttgtgttgtagatgttatctgttgggactgggatccacatgtctgtgttttgatcaattgtgggttttctgtaatggcttttgtctgttgcaaagaggagtttccttggtgagggtaggaaatatacttatctgtgagtataaaggcaaatatttcaaatgtagttggggattatgctggtttagtaatgtggtggttataggttctcctccaagacccatgacttccctggctctgggtagttggctaggtttctagagctaagcatgatttcccgcttggtggtgggcgggtcttaagtcccatgagagctgttcgttactgccaaggaaaacaccattccttcaccctttggatcattgtgtcatgctgcgggtattgtgggttggactgtcggttgcttccctcctttggaagccggcacagtgcttttttggtaccatgaaagctaaggctcagggtagaggccttcgggtcagttcaggtctggggcatttgggtgctgtgtctgaagtgtatggtgtcttcagcagtatagacttaaccttccacctctcaggggcagccaagggcactagcctgtaatgtttaaggagccctttggatgaccctgatcaagagctctaaagaatgtttctcatctctgccattggagtttttgctagatggtctttggttctttgaggagtattgtcagctcagatgggaaaatttccttaaactctatatgtataattatacatagacttactgtgtattatagatagtttaggttggtggttaataatatgactttttcagctgtcctcttactttatcctttccctcccatgtttatctccctctcctccctcactagaaaccctcccccattttcccttttactcatactcctccctgggtccctctacagtggtcccttttttactttcctgcttctacagtcactcaaggctaatctactcacatcaaaagatttgaggcttggagcagccagtgagagacaatgtatagcctttatctttctgacaaagtttgagtctgggttacctcactcaatagcgatctttcctaactccatccatttacctgcaaagcttatacttttatttatttttaacagctagatactattcagaatatagtgatactctactatattctgtagagtatatgtaccacactttcattattcatttgttggctgtaggacgtttatgctgtttttattccctagcagttctgaacagagcagcagagaacatgactgggcaagtgtctgtggaggatgtcaagtcctttgaccatgtgaacatttccctttccttcccttcccctttttcccctccttccccttcttcccctccttccccttccccttcccctccttccccttcttccccttcttccnnnnnnnnnnnnnnnnnnnnnnnnnnnnnnnnnnnnnnnnnnnnnnnnnnnnnnnnnnnnnnnnnnnnnnnnnnnnnnnnnnnnnnnnnnnnnnnnnnnnnnnnnnnnnnnnnnnnnnnnnnnnnnnnnnnnnnnnnnnnnnnnnnnnnnnnnnnnnnnnnnnnnnnnnnnnnnnnnnnnnnnnnnnnnnnnnnnnnnnnnnnnnnnnnnnnnnnnnnnnnnnnnnnnnnnnnnnnnnnnnnnnnnnnnnnnnnnnnnnnnnnnnnnnnnnnnnnnnnnnnnnnnnnnnnnnnnnnnnnnnnnnnnnnnnnnnnnnnnnnnnnnnnnnnnnnnnnnnnnnnnnnnnnnnnnnnnnnnnnnnnnnnnnnnnnnnnnnnnnnnnnnnnnnnnnnnnnnnnnnnnnnnnnnnnnnnnnnnnnnnnnnnnnnnnnnnnnnnnnnnnnnnnnnnnnnnnnnnnnnnnnnnnnnnnnnnnnnnnnnnnnnnnnnnnnnnnnnnnnnnnnnnnnnnnnnnnnnnnnnnnnnnnnnnnnnnnnnnnnnnnnnnnnnnnnnnnnnnnnnnnnnnnnnnnnnnnnnnnnnnnnnnnnnnnnnnnnnnnnnnnnnnnnnnnnnnnnnnnnnnnnnnnnnnnnnnnnnnnnnnnnnnnnnnnnnnnnnnnnnnnnnnnnnnnnnnnnnnnnnnnnnnnnnnnnnnnnnnnnnnnnnnnnnnnnnnnnnnnnnnnnnnnnnnnnnnnnnnnnnnnnnnnnnnnnnnnnnnnnnnnnnnnnnnnnnnnnnnnnnnnnnnnnnnnnnnnccctccttccccttccccttcttccccttctttcccttccccttcttccctttccccttcttccccttcccctttcccttcccttcccttccttacatgaccctgcttgccttttttttttttttttttggttttttgaaacagggtttttctgtgtagcccggactgtcctggaactcactctgtagaccaggctggccttaaactaagatatctgcctcccgagtgctgggattaaaggcgtgcgccaccacctcccggctccgcttgcctgttttttaacatggccttttcctttatatatatcaatacaactaaacggtccctgtaatgttacttgtgtttgtgtgtcttcagggctggccatttggtattgaatgtccagtcggtgtgttcttccccggggaagactattgctcccactctcatcattccttaggtgacagtttaattaggtttgctctttgacagcttcacacatcttcttccccacactgctttgggcatggtgtttccttactaagacatacagtgtatcaagaaggtatcagagatggtgtattcctaaacagattacattgtttgctttatttatttcagtgtccacaaatgagatttccctgacagtggacaccgcacgtttaaagaggttcgggttatgggaaagcaaggatgaggaccacagcaagaggagccacgctatccttttcctctggctttcctcagactaccttcaagacattcagacccagctagaaaaccccatgctaagccagcaatgtgagtataaagatcattccgaaatttcaggagaatccccaaagttagatgtgaagtaatttttataaaatagtttaataggctatctttatttcattggattgaaattaattgtattgcattaaaataatgttttccagtaacattaggtaaatcattttaaatattcatgtgattttgcctggtaattttatccagttatggaaaattatcacctaaaatgaaaagataccctaaaagtcttaaatatttatgtacacttaaaaactatattttagtcagttatgtctggtaatattcctttttttgatttttttttttaatgtggaaagtattttttattgtcctgagttaattgtcatctccaggacttactatctctgtcagctaacctaggcctagtcctggaagctcccagtctgcatacaatctaatgcaggcctagaatgttccagcctgggaggctttctactggataagctcaccctttctagttctatctgaactctggttcaactcagctgttctggctcaaactcgtctcccggctgatctattcaatctggctttttctctcagcctctgagttgctctgcttggcctcaaactaactccgcaatcttttctaatgtgactccttttcattctctgctttgttcagtctttacttgtgtctagcttgttctcttcaatatgtctctataaaactctcccagcaaagctgcctcctcctccctctccatgctgctctactctccctctcaactctcttgcactgctgctctccacgaaatctcctatatcctgcactgaactctcttcctcctgtactgtatgtctctcccttaagtagcttccctctcctcctctttttctgagagttgggcatatcccattctgtcacgtctttctctgatacatagcttattgtgccactcaattagacatccctttcaaatatgggtgcttccttctacaaactaactttacattcattctttgggattaaaggtgtgtgctaagggctgacatggtaactagaaacaggttcaaatatcctgtaacaaatatgtgaaacaattgttttgttatgacattttcatttttttttttttggtttggaattgattctctttttctttcttttctttttttttttttttacatattttcctcaattacatttccaatgctatcccaaaagtccccaataccttccccccccacttccctacccactcattcccattttttttggccctggcgttcccctgtactggggcatatacagtttgcgtgtccaatgggcttctctttccagtgatggctgactaggccatcttttgatatcttttttttttgatatcttttgatacatatgcagctagagtcaagagctccggggaactagttagttcataatgttgttccacctataggtggaacaacattttcatttttaatatactgtttgcacttgtacttcatttcccatttttcctttcctctcctctgggccccaccccttcagattgtccagttctgctttcatgtcatgtctacatggcaagcacataattgatgtaggaaagttactgattttcatatgttggagtctttatgctgctcatttgatgagagtgccgtgtgtgcatgcacgtgtgccttcacctgtgtgtctatatgcctgtttgtgcaggtgtccatggaagccagcagggtgtgtcaggcggttgtgagctactggacagaaagtgttaactgatgagctatgtctctagctctgttaattattttttaatggtctagaagactagaacagtgaatctgatggccctgggcttttctttgttgggatatttcttcaaccttgttgcttgtgttagatctatatatgtatacattacatatataatattatatatattatatcttcttgaattacacacacacacacacacacacacacacacacacacaccccagtgtagaggtacaggacattttatgagagtcagttctcttctaccctgtgggtcctgggatataaaacttaggtccccagttttggtggctgccttcttttttgacccatggtagcatcccactagtattagtctttactctgtctaagcaccaagtcttccttgattctttgtattgtacatttactgtatatttaatcaaggttgtcctgatcttctttctttttttctactgagttttggtttggcttgttcttgtttcccaagactttgaagtgcaccattgacttactggagagttctttgatttttttttttttttttccgagacagggcttctctgtatagccctggctgtcctggagctcactttgtagaccaggctggcctcgaactcagaaatccgcctgcctctgcctcccgagtgctgggattaaaggcgtgagccaccacgcccggcctctgattttttaatttgatgtaagaactcatttgctataaactcttcccttgaacagcctttgctctatcccagtgattctgatgagttgtgttttcatttcatttgattctaggaattttagattttcattcctgcctgatttcttcaatgacccagtggttggtctctcaagagtgtttagtcttcaagtattttagtttctttcttgctcttgattatattcatcttatgatctgaattgatgcaaaaattgttttgtttcttttgtatttgttacatcttacttcataggctaatgtgtgactttagagaaagttatattatcctgggttacttttttaaagatttttttcctgctcgttatttcattataaactgtgacacaatagtcaggttaagtaaaatatagatatctttatattctatgttttcttagtttctgataaataaatttagcttatgtacaaatcagacttctaagacttgagttcagtgcttttctgtgaggtctgataacacacaaatggctacatatatgtatcttgaaaaatccaactttgtttatttttcatctcccactggcatctggtttaggattaggtaaatacaattagtaatatttgttctaacgtttttgatctcttcctatcctctactttttaaatgtatgctacatgttgtagtgagttatacccctaaattaactattttctgtactaattatatacaatagggaaattcataattagataacaagaaattataaaattataaagagccattcataatcacatggataggttgatttttttttgtttgtttgttcttgtgactattattggttaaaaaaggaaagggatgtttaatcagagtgctttttaaatttgtaggtggatccatcatggaggctagagtagcatagataatgacataagtatcattcattcgtttatacattcattagcaaatactagcactttttagctgctaggtacagcagatagacgtaggtactgtttgaaaatttcattccagtgaggtagaataggagcctaaaaattgtgattttgggtttttgattactagttgttaaattttggaatttaaacttgtctgttattacctaacatacaaaatacttggttgggttttacataaaactcttactgttattcactgttagattaattataattgcctttaaaataaaaattggtttcttttttcttttatagcaaaagccaatgaatttattttccttgagttaaacagttccatttcacaaagagaagaattgaaattgaaagatattatgatggaaatcagtacaaaaaatggaaatttacacctgtcttgtccattgccctgggtccaggcacttcctttgtttcaggatctctctccacaagaaatctcttttcttcactattactatgcttcagcttctgctctccccactgctgctggggcagacatgaagaagaagtcagtgtctcaggttagtatattattaacataattagcataatggtagagaggtaaaagctgctttgctgtttaaactgctgttggttaaacgcatacaagaaccaacataaagcagctggaaagtttcctcaacaaaatcaatagtggtgggatgaaattgtaaccaaaggacatcataaacgtcttgggtctgtactgatgcagatgggggtgacaacttgaatgaagtaataagtgggggacagttcttagagtagaattcagtaactgtaaaaaagaaataaaatacaaagttacaactgaaatactgtacttaagattgttgctggccaaagtcttgaatgcattctgaatttaatggttgaaaactctggagagctaccatatgtgtataacctcaagtcccctaccccaaacattcattaaattagaaaatgacagtagtactctgtagtgaagagtcctggcagatggcaccataaacaagtgagcatagctgttagcaccatctgcagtaaggcacaccccttcacactgagcagggcaaacatgctgtaatcttctcaataatgtgtaatccagctcttatgtcaagagaaggaggaggcagacccactggggactaatagctaaaagaagtggccattattatcttactactaaggttctgaaggacaagacaaggctagcaaagggttttggtgggaaaggtagtgagagcagactgaagtcctcagctaatatgctaatagtcagattttactgatttctgctatgaagattaagagaatatagacaggattttcttttttcaacattctgtaagtctaacattatgtcaaggaatagtaattagaagtgttatatctagccaggtgtggtggtgcacgcctttaatcctagcacttgggaggtagaggcaggtggatttctgagttcgaggccagcctggtctacagagtgagttccaggacagccagggctatacagagaaaccctgtctcgaaaaaaaccaaaaaaaaaaaaaaagtgttatatctaggagacttttagagggcttactgggtaacatgcttgttgtgcaagtttctggaacccacagaaagctggaaggagagaatcaacatccatgcacatgtgtggcacatgcatgcccatacatacgcatcataaatgcctatatatgtacaatgttaatggtagatcaaataaaataaattttgcctatttgtagattgataatatacctatagcttctatagttgtcattcatgtctagaaggaaaagtgtttcttcctgagtggctgtggtacacatgtagtacatatgtacagacatatactctgaggctctgtgacagtaaggcctatacatagtgttagatgaatcagaagatattactatatgcatacaacttcatatatcaccatttcataatgggatgccaatttatgatatgaactcagtctcttttaacataaaatttagtttgtcataggattattattacctgttttaattattttgagacacaaagttgatttctttaattttggaactcatgtctggaagtaggactataggttaaactttagccattatatcatatgtgaaatcttttgatcaaaagtatttttgtttgattatatatgcataggaaatttaaaagtgtagttgttactttttgatatacatttattttagttgcagtttttcagttacaaatgtagattttacctcatgtgtttttcaaaattgatatttgttttcatgtacttacaagagtcttttttttccccagccctcaaattcagacaccatcaagcctacttacaccttcctacataaacaaagtagtggttgctactcgctctctattacttcaagtccagaggaggaatggcaggaagtcaggaacacgggacccgttcagaagtatgagctgtgtccatattagtagctttactagtgctgctgctgctttcaagtagcttccctggtgggaagttttgagttttactattatgttcctggcgagtagtggaagtagtattgtcgatgagtgacatgcaaattatcatgaaaataataggtgtcatttcatttaattttgtgtctgcatgaaaaaaaatgactcaccacaatttggaaacattcaagagcttattgaaaatcctggagtagcaatgtatgtttttagaaattgtacatcttatgtgtgaaaatataataaggaaataaatttgcttattaaagtatttttcagtttaggtacttcggtgtttaagttctctttttaaaggtgcttcttggtagatcatctttcatatgttttcggttggtaaggcagaatattggagattacttttattgctttgagtaatttttttctccctttttaagcagtggaaagcccaggaaaaagcaataactagttacatagaaactgtcaaattacatttaaaggttcagttttcttgtctaagtgctttggtgccgagatgacatcaattgtggatgacactgggctttgtgacatttttctggtacagttatagctttattaaattactgcacttgcccctcaaacgatgccctgctgattgtgagattgtagcctgtagtccactcatggttgtgtctctaacctctaagaggatgtgccaggaaagtgcttatgagctgtcatttgtcaccaccactctttggttgtggatctgatggttttctgtcacgtatgttctgtcacatacactgaaagcatgtatttaggggaaagctgccttgttacttgtttattgtccagctcctggcctccagaaagacttgagtgctggcctttctgaatgctaaagaattcatttgagattcaaatttagaagtgtaaattggagcatcaggaaatctttgctttatgatagcacttactgaaagttaaaaattacacaaaagatttgtataatgtaggaaattttgaattgtagagatttattaaaacataggaaagtataatctgttatgtcttagcagatactttactgtatagagtttagctatagaatattaccacctactagctattttatatgagaaatctaattaataatatattaatataacttatataaaactttgcatattccatataaataaatgtttatatataatgtaataatttatattttaactttatttttattttttaaaggttgattgtttatcctccaccacctactaagggaggcttgggagtaactaatgaagatctagagtgtttagaagaaggagaatttcttaacgatgtaatcattgacttttaccttaagtaagtatactaatgatctctctcatttgtttataagcttcattgtgaaactgattaagtttttttttcagttgtgcttgggattgaacctagggctttgtgcatactaggaaagcactcagccttttagctgcatctcctcttgaaaataagtgtctttatctgaattattttcaattttagtcagaagtaagctggcaaaatttcagattcagacagtgtttgcctgccggaatcctgccgaagctgacagttcagttgtatggactcaccagctacaggcactacacatggtggggagttagcactgctgttctcacttagttatgtgttggatttttgatgtacttcttgaatattgtgtatcatggtgaaggacatatttacaaaattcagtacactttgggaatggaaaagaaacaaccatttagtaactgttgtcagtgctcaagagcctggggacctgagacagaggagctgatagaagaggcagaccacagtctcctgcaatgaccagctttattcagactgaaaggcagtttatatactctgaggggtaagacagggcaagagtaaaggagctctcatgggtttcagcttatacaaaaatcaaccaaccaaccagccaaccaaccagccaaccagctaaccaaccaaccaaccaaccaaccaaccaaccaaccaaccagccagccaaacaaccagccaaccagccaaccaaacaaccagccaaccaaacaaccaaccaaccaaccagccagccaaccaaccaaccagccaaccaaccagcttttcatgcaaagaaaatttgtttttattttttactttatactatatctctagactaaaaaattctaactcctgattgaaagatctaattttttttcttttttttattggacattttatttatttacatttcaaatgttatcccctttccagatcccccttccccagaaaccctctatcccactctccctcctcttgcttctatgaggttgtacgcctacccatccactcttgccttcccgcccttgaattccccccttcactggggcattcattgagccttcatgggaccaagagtttctcctcccattgatacccaacaaagctatcttctgctacatatgcggctggagtcatgggtccctccatgtgtactccttggttggtggtttagaccttaagagcgccttctcaaataaaattactatcatttagattgccatttttattcataattttattttattctagtcccaaaggctcaggatctcacattatcacaaatttatagacatacaccttaaagtctctagaaattcagtttagtttattttatctttcacatgggaatacaattctaatgacatctatttgtctgtctgtctatctatctatctatctatctatctgcctgtgtaaattatggattggcattaggtgctgtttttttcttttttatgaatcatgctttgtagctttgcatgtttgacattttttaaggaagattgaatattgtttagtttcttgaagcgtttcagctttctgagacatgattacattatctgaaagttgtgtggtagtttcaagagttttgtttttaaagatatgggtatgtttattgtttgttaaagtgagagtaacaaactgattgctattaccaaggaaggactctatcaggtactgtctctgctgtctcatgaattacaaggttgcccagtttcactggtaggaatagatactgttctattggtctgggtgaattctgtctgccattccctgttatcataatgggtgatttttctctaacgtgatacttccctcatcctcccacacacgcagacacacagatcagagtaatatggaagatgtgaggagctgcaagctgtcctgagttctctgtctctgtacgctttccttttcagcactctgatctgtatacttcagctacttagctatctaaagttattaaactattaaagcagagtaggctatcagcaacagcagctttttgattatgaaggctataatcactaagcaggtaataaagtgacatggaagaagtactttaatatggaagtagattaacaatttaagctggaaatacccacttagtatgtgtgttttctagattatactcgccgcagtcttatatttatcatgtgatacttggtctacattctcttgaaatttcacttgtttagattgtgatttatgtttcttttactgccatcctagcccatattttttttgacttcagtgtaaatgtggtgcttaataacatgttagcaatttgataaatatttattaaataagtgggcaatttctactttaagtgattattttgaaaggcaaatgataactaaagaagaaggtgaaagcccaaatcgtagaaaaaatgctaaatgtctttgaatttaactggatgtaagagtaattcccagttaataaaaggtaattgaagaaaaccatataaattctaaacacagttttctttgtgggtttgctattttacaggtatcttctattggagaaggcatcagatgaacttgttgaacgaagtcacatttttagtagctttttctataaatgcttgacaagaaaggaaaataatttaacagaagataatccagatctatcgtaagtcagtgtaatgtaactgaggttgtaagaggaccgtgtgtgtgtgtgnnnnnnnnnnnnnnnnnnnnnnnnnnnnnnnnnnnnnnnnnnnnnnnnnnnnnnnnnnnnnnnnnnnnnnnnnnnnnnnnnnnnnnnnnnnnnnnnnnnnnnnnnnnnnnnnnnnnnnnnnnnnnnnnnnnnnnnnnnnnnnnnnnnnnnnnnnnnnnnnnnnnnnnnnnnnnnnnnnnnnnnnnnnnnnnnnnnnnnnnnnnnnnnnnnnnnnnnnnnnnnnnnnnnnnnnnnnnnnnnnnnnnnnnnnnnnnnnnnnnnnnnnnnnnnnnnnnnnnnnnnnnnnnaaggccagggtgtagctgagggagtccacctctcctaccatgtgggtcctggagactgagccaactcaccagactgacagcagctggcctaaccagctgagccagctctctaactctaactaaataaagaagaagactattcatgctcctggtgaagtagcatcgttgtaatactaccaagaggaagcattctgcaggtcacaggttcctctgctttgagaaccatttcttaccttttgctgttcactgtgtaagagggaggttggttttcataggccacaaggagtgaaaagtcagactgtctcccctacccttcttgctttggactgtgattttatcagaggttgtgtttcccctgtggagctggacgtggctaccagacctttaccttccacttggaggcgctgctgctctcctttctctgctccccagggctagagcagttcccactaggctcttcttcagtacctcactggccttttaaaacgcgtacttcctgttataaaagtgtagagctgttttttccctctgattaatatgtcttgctgacatgctattacattaagttatgataactattgaaataccattcttatttgcataattttgctaaatttctctatttagtttttaaaattattaacacttgagcagtagataggactagaaaaaaatgaagaaatagttattatttattagataataggaactcaggtaggtatgatagcatagacttctttacggacccttgctccatgtacagcaattagtattaactcaatgactagatcttgcgggctgttgaaatcttttttagcacttgtatttcacagtgagagatctgtaatcgtgttgtttcctatttgttggtaatcctagctttctgtgaggtcagagtctttctagtttccacactctatccagtgccttgctcagtaactgaaaataataggaagtaaaaacagaagataataataatgcctcttactaaatagggagaactgttagatatttaattagggatattttacaattaggaactgagtaaaaaactgggcagtggtggcgcacacctttaatcatttcttgtgtgctttctttcaccttccttaaattcattttggacagttcaggtcctttttttttttccattttttattaggtatttagctcatttacatttccaatgctatnnnnnnnnnnnnnnnnnnnnnnnnnnnnnnnnnnnnnnnnnnnnnnnnnnnnnnnnnnnnnnnnnnnnnnnnnnnnnnnnnnnnnnnnnnnnnnnnnnnnnnnnnnnnnnnnnnnnnnnnnnnnnnnnnnnnnnnnnnnnnnnnnnnnnnnnnnnnnnnnnnnnnnnnnnnnnnnnnnnnnnnnnnnnnnnnnnnnnnnnnnnnnnnnnnnnnnnnnnnnnnnnnnnnnnnnnnnnnnnnnnnnnnnnnnnnnnnnnnnnnnnnnnnnnnnnnnnnnnnnnnnnnnnnnnnnnnnnnnnnnnnnnnnnnnnnnnnnnnnnnnnnnnnnnnnnnnnnnnnnnnnnnnnnnnnnnnnnnnnnnnnnnnnnnnnnnnnnnnnnnnnnnnnnnnnnnnnnnnnnnnnnnnnnnnnnnnnnnnnnnnnnnnnnnnnnnnnnnnnnnnntacatattgtgtgagtttctttgtgaatgtgttacctcactcaggatgatgccctccaggtccatccatttggctaggaatttcataaattcattctttttaatagctgagtagtactccattgtgtagatgtaccacattttctgtatccattcctctgttgaggggcatctaggttctttccagcttctggctattataaataaggctgctatgaacatagtggagcatgtgtccttcttaccagttggggcatcttctggatatatgcccaggagaggtatcgctggatcctccggtagtactatgtccaattttctgaggaaccgccagactgatttccagagtggttgtacaagcctgcactcccaccaacaatggaggagtgttcctctttctccacatccacgccagcatctgctgtcacctgaatttttgatcttagccattctgactggtgtgaggtggaatctcagggttgttttgatttgcatttccctgatgattaaggatgttgaacattttttcaggtgcttctctaggtcctttttgttacttgttctcagggaagtaataagaaacccgcggaagaactggaagagagtggatgaggctcagccgtgctcttaactttgtcctgtcctttccttatgtgtgattgaagggagatagatgaagcttatgtttaaaattaaagacagaaccctcatttcacctcctccactagactttaacatgtaccgcagagcagctggatacttttgtaaaggtctggtgatcctctgcgttatctctaagtggagcaaagcagacagagttaggtttgaaggtgtttgtgctcactgctgagcacacttcggagtctacaaagcctgccgcagtgtactgcctctactctgtttcctccattactgtttatgggaatagacataagaacaatgaaatatagttctgatatgataaagtacgtattttaagatggtggcttaataaacctagcatttaaagtgtaaaaggtagcttttaattgcataacttaaataaaaaacttttacctttcagttctatggcttaaattacaatttaaaaattaaatctatgtctttcattttcttagagtggctcagaggagacaccgaagagtgagaacatggactcgtcatataaacatttttaataaagactacatctttgtacctgttaatgaatcgtaagtatttttgagtatttgaaagccagttaagggttaagaaaagttatttgaggtataatcaataaaaaggctacacaatgcagaagtcacttaagtttttagtagaaaaaaataacaaatgtctcaaatgttataataactaaggcaattgagttaattgtattagaattaaattctaatgcaataagtgatgttatgggtcttttttactaaaagagattttgaaaagaaaatactgaatatatgaaggtagataaagtttgaagttttatttacggccttggtaattgtggctgttcatgtggatcttatatgagttactgtagtagatgttttcacaataagtaaaaaggttatcatatcttctgtcacagatgtagttctagaagattcttctacgttgttctgattggcatgttattaagattacagttcttttcaacaggtctcactggtatcttgcagtcatttgtttcccatggctagaagaggctgtgtatgaagattgtccacaaactgtgtcccaacagttccagggtcagcagtctcagcatgaccacaaaatgacaggtggcattcagtgttaatgcaccattttaaataataatcctggtaataagcagattaagtgaaacaatatgaagctaacagtctacccatttattattaaacatattagaagagtaaaaatgtttgaaatatttagaatatccaggattatacataatgtaactctaaaatcatagtgttgatgctaagttctattacagcattttaagaaaatagctttctaacgtgactctgaattcacggaatgactcttgagacatagcttaaatcactcgtttattatatttctcatgtactaataattcagagtcagcatagacacccatatttcttctataattttcttgtgacatctaattttaaataagtgaatgagcctaatttctttgaaaaaaaatttttaagaatcaggtgttgttttgtagctgtaacctaaataacaagcaaaattggtagcagtttttttttgttttgttttgtttttactaatattatccataacctgtagaggggaaggagatacactgtggggcacctgacacctgtttattttccatcttttcttgtccttttgagttttgaaaggtagaataacatgactagtcaatgaccctccacatcacagcacacagtgttattagtgggctgtatttgaagtagtcttttcagaggaaatggacccagccattttgtatttcaggttttcgctctgaggtttctgtattgtgtgataacaacctgctcttaccagttttattcacttgactaagttttcccataatactgactataaaaaaatagtgtttctttaattagtactttgactgcatcttaaagtttagattatctatattatctgtgttaacacagaataaagactcatagtgacttatttattactagataatgatccacataccacttcaactgtgtccacgagtgcagaggattcccaagtaagtatgttctacccagatgtgaagaaaggaaaacacttataaacattaaaagctcattataaaatggggtcctacctaactgtattgaaatgattattagtggctcataattaaattgtggtccttttttgattatctctacaatttttgggaaagaaaatgaagttctttagtagtttgtgtttacttcctcccttggaaattcattttttcctttagaaaaataaaggcactaagatgatcattcaggaacttataagcaaaatcattgtcagcgaagcccacaattgctaatatgtttactcttatcatagataaatataccctgattccttctcagcctttggtttagatcaaaggcaaattaaaactctttgtgtgtgtgtgctccgaagggaagaaatatgactgtacagccttagttgatgtggtggtttgaatatgcttggcccagggagtggcactgttaggaggtgtggccttcttggaggaagtgtgtcactgtgggagctggtatttgagagagcttcttccaacctgcctggaaagcagtcttttttctgtctgcctttggaacaagatgcagatctctcagctctttctctggcaccaggcttgcatgcacactgccatgcttcccaccgtgatgataatgaacagaacctctgaacctgtaagctagccccagttaaacattgtcccttttaagaattgccttggtcatggtgtctcttcacagcaatggaaaccttaagacagaagttcgtaccaaggacttgggtattgctatgataggcctgaccatgtttttgtttggaggaatgtggatttgaggactttggatttagaaagcaatggaatgttttaattgggacttaatgggatatcctagaaggagtatggaagacattagtgctgtgggtgatttgaactgtagggtcctggctctggatgtttcagaggagaagaattttaatatgtggcctagagactcttcttgtagtattttggtaaagaatgtggctgctttttgccattgtccaaagagtctgcctgggactaaaagatgaagagatcaagattaattgctttgacaaaggaagtctcaaaagagcctggtataatttctattgtgtggttattaaagttcactcttatgaagagcattttaatgaaaagtagcaagcatagaaagaaaaaaatataaaatgtatggatgaaagaggaaaggagcaccaggaagtggaatgaaggtaaatcctgtgctcaaggatattaaatggaatatggagtgaacaagaccccacccagctaagcttatgcttttgcagttgaacaagggacttgattattgtttttatttggacttttaatctgaaatgaactacaatccagaaatggagagcacaagtgtgattcagatcttgaggttggaagacactggcttttgatctagatattgaggaatagtggccataaaaagcttaggctcaacatggtggcacatacctttaatctcaggagacaaacagatatttgagttcaaggccagtctgggacagagcaagttcaaaatagagaaaggcttaggtccaggtgtggtagttcacaccttcaatcccagaactcaggagacagaagcatgcagatctctgagttcatggtcaatctacagagcaagttttaggacagccaagcttacacagtgatggaattggaaaacagaaagctggtaataatgtaatagaacaagggggccgtgttccagccccagcaagcagcagaacttagcagctttggccatatagctctggcttttgagtcaagaggagaggagactactgggacaattgattctggttagctcgagctacgaaatttgtggtggttaagaagagatcagcactactgaggcaaagtcttctggtaagtatttttctgagagaacaaagaacctatgttctagatagaggtagccaaggtggtacttcatgctgcactggacttgttaatgtgtaggagtcacccaggtggtactggttttgacatcatgaaggagtcatggagagttgctgaggttggtactgtgagaggtcatggaaggccattggtgaaggtgcagcctcagttgcagttgaaggcccaggactgaaggggtcatgaagttgaggcttgacactgtgaagagagcctataagaggctattggtgaagtctagttgcaatggaagaccccaatgcattggaggtgccagtatcatgggatcatcactaagagcagcagcagctatggagtcaaccagcgcctatagtgctacagagggcagagctggaggaaagacccaagcccttttgagaagcccagaagttcatgtgtggatcccagacattggaacaagaagctatgaaattgaagtaacgttggataccccaagaagttagagatgtcagagctgtgggatacctgccaaggaaatctgctaacgaggagtagaaccagcccaagagaaggaagcttgtttcagtcaacaaagataaaggagttggagatctgaagagtgctttgaaattagacatggagatgctgagtttggagtatgcccagctggcttgctttggtccaatatttccttaccatgacattttggaatggttatgtatattctgtacgatgttggaggtatgtgatctgctttttgattttgatttcttaatagcttaccgtttatagatgaatctcagaagagactttgaactttggacttctaacattgtagagactgttacagactatgggacttttgaagatggacaaaatgtattttgcattatgctatggctaagtatggcccccccaaaagactcatgtgttcgataccatgtgtttgaactagcctatgggggccagggagtggaatgtggtagtttgaatatgcttggctcaggtagtggcactattaggaggtgtggccttgttgaagtaggtgtggccttgttgaaagaagtgtgtcactgtgggggtgggatttgagaaacctttctcctagcttcctggaagccagtctttttctgtctgtctgtggacaaggtgtagaactctcagctttctccagtgccatgcttgcatgcacactgccatgcttcctgtcttgatgataatggactgaacctctgaacctgtaagccagccctaattaaatgttgtcctttataagagttgccttggtcaggtatctcttcacagcaatggaaaccctaactaagacagctaagtaacagaatgtgtgtaagacaagttatcttatttgtctttacaataataaataaaaagaaaatgttatattcttgcttaggccaggttggagcatgcccagggtcaggaagaaagtgttccagcagtgagctttgggaagtggagtgaacttgctttgttttgaagtgaaatgtggaggaaagaattctgatttgtaaagttaatttcagtattcgaaacactttaaagaatgagtggctatcaatgtatttaaactagcttaaattgtaagacaaaattcatgttatttcagagtaccgaggtgaatatgtcagtaccaaagaaaatgtgtaagcggtaagtacatattccaatgataatacaaactttgaaaattatatagttttaaagatttattttgtgtgtatgagtgttttgcctacatgtgcatatgagtaccatatgtgtgctaggcatcactgcagaggtcagaagagggttttggatcccttggaactggaattacagataattgtgagctacagtgtggatactgggtaccaagcccatatcttctgcaaggacaagtgctctgaaccaaagctacaatatctgtctttctatctgtctgtctgtccgtccgtccgtccatccatccatccatccatccatccatccattttaagaaatgtgtgtttgttgaggggtttcagattccatggcacatccacatatatgaaggttttaggacagcttttgggaatcggttctttccttctacccaatattgaagtcaggccatgagacttagaggcaattacctgttaaactatctcaccagtcctggatgttttctttgtttgtttgtactttggtattcgtctttatgaatctctatatcttgatttcttcctttgtgttttaaaggccatgtattctcatactagactccctgaaagctgcttctatacaaaacacagttcagaacttacgagagtaagtaatgacaccttttacattcagtctgttatgtaaaacctcagcatttttgaaactaccttctgtattactcaaaactaaataccttcagtattaataagtcctgcagatggggggtgggtagcaaaattgtcctacagtccaacactcagaggcagtgttgcagcctgacaggactatgaattcaaggtcagccttgaagggcattggactataatagattctggttacatatatatgtatactcatgatactgtcaatctcctttttacatatgcatatcatttttcaagacagggtttttctttgtagcctgtccagactgtcctggaactttctctgtagaacaggctagccttgaggtcagagatctgcttgtttctgcctcctgagtattaggattaaaggtgtatgccatcactacctagcataataattatatttttaacatataacatgaacctggatatctgattgctaacaacatcctttattatgtgttaatagtgaaggatttagatttgtcaaaggtaaattcaaaatttgtatttataattgaataaaaccataattttatacaacagtattgcagatattggtgagtatccaaaataaaacctgaaaagaaagtagaaacttgtaaatttctattagtgtgtgtgtgtgtgtgtgtgtgtgtgtgtgtgtgtgtgtgtgagagagagagagagagagagagagaggagagaggagagagagagagatgtttgggtctggacctaggtgtggaggttagatgacaacttgtgacagttggttgtctctttccactatgtgggttctgggggtctaatctaggtcgtgaggaatcacagccagaacctttgctagaaagtgctttaccagtttggcactagagaagaattctgtaatttaatatccgtgctagaaagaaacacaattaaaattaaaagccatgtgttggcttacttcataatataaataacgttgtttcctgaactgtgaacatgatgttgttgagaactctaccttttatttgaaaatcactttcttcacagtggcatttatgaaggctcataaattatggttgtattgtgaaaaatctgtctttggaaattgaatttaaagcagtagatactgtaaaggagatttttcttcctttgtagaaagtgttgctgactgatgaaggtttctgctcaagccattttcctcattgattatttcaggtatttggaggtagagtgggaggtgaaacgaaaaacgcaccgtgaattcagtaaaaccaatatggtcgacctgtgccccaaagtccctaagcaggataacagcagtgactgtggagtctatttgttgcagtatgtggagagctttttccaggtgtgtgctgacacagagttttcattcacagttactgatgtgcagttgcagatctctgccagacagacaggcagggaaatgtaagtaggcacggacatggcgagatggagagaagacatggagaccacagtgacctagataggggaatctggaaaggttaaaatgatttgattattctgttaaatccaagaaagccatagatgaacaaaatgggtgaagacatgaaatacagaagatatcaaaggaacattttaaaggtgaaaacatacacaatctatgaagaacttacttggagtttttaatgtagtaatgcatgcatgtatgcctgtgtgattaggcagctgaagcaagatgatgagaaaacatagaaaagctctcactcaaaaggataaaaccatcactaggtggattgtggggatgtccagccatttgacatagatacagtcatattcataggtatcctgggattcatgtggcctcagggctgcaggttagacacacctggtagcatattacatacagcagaatatagaattaaataatttgaaggaaatagtagcaacaagtttgataggactaaggtctcatttttacataattggagtcctagaggcttagtgaagtggtgcagataaaatacaaaaagaaaaaaaattccttatgcaaaagacccatttacttaagtctctcagagcaccatagctgaggaaacacaactagaagcacaactagaagcatggccgttattttctaatccatagacactgtattggcgtgtagcaacattaaagacagatctttaaatggcagggagccaaggcttagtgctgtcactagcaccgtctcttatgaagacaggcctttgaccagaagtctatttacagaattcttgtctgcacttgggacttttaatgttggggtaatggtgtgggtgtgggatgacactgcatagtaaaagatggttagagaaaccatcgtgtaattgttacattgtgcttagactcctttttcttccacactggaacttcattaattgtgacagttttgaccctctagtattgttttctagttgattttgatttgaagtttatagtatgcagtgggccttgttagtgacatattctgactttgttatttaattccatttaaggtcgtctcagtcaatagaatacattttaagtacaggatcacaatataaaattcctaggagaaggtggctaaaagttctaaacccgtatcttgtacatttgtgcactataggcttgaagaactactggatttccataatgaaagcaatacaaattctaacaaaaatatcagtccatcactcaggcactggcccctagggtcaccgtcagtcagtaagtccaccctgatgttccacggcagcccgtttgttcttctatcctgctttgagatgcaaggcattgtgctagccttttacacagcacagtctaaggtagccttctatggcaaccagagcagttaaacacaagttaaacaggagaaatgacattgtagttgtagctcaactttgccactaaattaaccttatggaaacgtagttgttctggaagctgtgttctcccctaaaggacagcctttagtgggacttttcatgcttccaactctggaattctttattacccggcctttctccataacagtgtagcaatagtaacatgtgttccacctagtctgaattctgggtttttctgaatcattttttaccaattaccatcactcaaacatgcattgtaacaaagtagactatttaattttaatgtttgaaagttagcaatcgaatgaaattgttctaaaatagatggcagccatggccacctagtcgaaactgaaggcttactgtgttcttggggtgagtggcggggtgtggtttgctgtggtatgcagtaaactgttactttttgaaagatagcatttttgttgtttcctataaaagggatattttaaaaatttgcaatcatgatgtcacattgattgcattctttccttatctcttactaggatcccattgttaactttgaacttccaattcacttggagaaatggtttcctcgccatgtaataaagaccaaacgggaagatattcgagagctcattttgaaacttcacttacagcaacagaagggcggcagctgctagttaatctgtgcacacacgcacccgctccctaagtttcctagaaagccgcttaccagcatctgtgtcagcttacaaagaagaaagcaactcccagtacatcacagattgttgaaatgtacatgcgatcttgtttgagtccttgggctctcccagccgaaggtgatgaacaaagtacttataagatagaaattaaaatctcaaaaatatgatatttttatgactaaatatgcttggattatgcaatagcatatgtaatgtgggaatgttttcctaaataataagcctatgtgatctgtacttccacatgactgggtgttgatgggaggtcggccctccctggtgccagcccagggcttgtcaggtgtgttgacaagtcacatcatattgtaattctaatctttgcagctcaagcatgcagtatgaatactgtgtatttttttttaaaaataacttagtatcaaggcttcagaaaatgccattcacggcatctcttctgtatagtgtgggaaaaaaaaaagaaatattaaaaaattaccctttcaaagtgcagcttattctccattactaaatgcaactactttgctctaatttccttctccacttgtttcaatgtcatatatatagggatctgagaaatgagctcatctgttcatataaaatgtgaaacaaattttaataccaaataagttttaaaatactgtgtagctaagctttgtttatttgatgcatagctatataaatattcattcctacgttaccccaaaatgtgtgtatacagtttctataaaaggtaaaattgataccctcatcattttagcaaagaatacctttaaacttgtatttattatttagaaccaaatatgtgatttttatcgtttggtttacccactgctcatgtgcaaagccagatttttcattgcttttatatttttaagttattgtttttaaagctatatgatcctctgtggatctcacatactcagcacttaacatttgattaaatgttcaggtaacaattgtactgaacttgtgtgtcgatgatagcgtcacctaacaaacagtttagagccttatgctcttagaaatgttctgaaggagacataatcatactgttttctcaaataatgggttttagaatattattttaatcatctcttggatttacagttataactgtatgtaaagcacttgaagcaaatgtaatttaagataaaaccaagaagtctgaaagtttcatttccagtcaagtgacttggttgtcagtcagcctccgcgtcctcggcttctgcagatcttgactctctgcgttgtttgaggtacgtggcttttggagatctcacatgaaaattgttattaattgcataattcattcccaatttatgtgtgttggggagaatttttttaaagtggctgttaattgtgttgtatatctaattttgcaaagcaggtatgtgagacatcttgtaatttctgaactgttttgtttgtgtgtttttcaaagataccatgatcattcatcatgttttggagactgtttaaaatttgttttcctaaattcatgtagaaatgatttgaggatatcaacattttgtattaaacatgttttcaattcattaaattgtaatttttttcttaaa

SEQ ID NO: 85 - DNA, 3685 bp, Mus musculus
ctggctttctctcttcccctccccctcccttccccagcccgaggggtcctgaggtgacagcgcctggaagtgggactggaggagccggcggaggagaagatggacagggccaggcctgggcgtcggcgagcttcatcagtggtcccaaaccaagtaggacaggtgacgttcctgcaaaggaggctgcatgtgggggacagaagcagggtgatgatggaggagtcactcctgagatggctgctcctcatcctaaagactttaatactggaaataaaggttgtgattatcttgaagaggggaccagcaacaagaatacttcatattcttattcggaaatggaccatactccagtttccaggaagagaaagaaaaggggtagaagtaattttcatgattctcataattctaagacttctttggataagccaacagaacatacaaaagaagaagaaaatgactcttcagtctcccgtaagcttgaagagtccggtgaagactctcaccaggacccagcaccacccgaaggactcgcgccagaatctttagagagcgaggccactaacctgcgctcattcgctgctggtcaggagccagatgctagcgctgcctctggaagggcctcttcacccaacaaaagcttggagagctctgcttctagtgaagtgtcggagaattcttccgtggctgtgaagggtgaggcgttgactctaaaagaagcatcccctccgggtggaagcagtgaagagagccagttgttgatctcagctgagccaattgtagtttccagtgatgaagaaggaccggttgaacataagaattcagtaattctaaaattacagcctcctcatgagattatgagtgaaaatcagggcacttctgacccacagttgtcagagctgacactcggtgcatgtgaatctgtacaggtaacatctgaattatttccatacaatcctgatgtagaaaacatttcctgtattaaatctaatagtgaaatggatctgaaattggatttcatatttacatgtgtgtatattggtaaaataaaaggaactccaaaaggttgtgtcacgttcacaaagaagtatattaaaatcccgtttcaagtgtccacaaatgagatttccctgacagtggacaccgcacgtttaaagaggttcgggttatgggaaagcaaggatgaggaccacagcaagaggagccacgctatccttttcctctggctttcctcagactaccttcaagacattcagacccagctagaaaaccccatgctaagccagcaatcaaaagccaatgaatttattttccttgagttaaacagttccatttcacaaagagaagaattgaaattgaaagatattatgatggaaatcagtacaaaaaatggaaatttacacctgtcttgtccattgccctgggtccaggcacttcctttgtttcaggatctctctccacaagaaatctcttttcttcactattactatgcttcagcttctgctctccccactgctgctggggcagacatgaagaagaagtcagtgtctcagggaggcttgggagtaactaatgaagatctagagtgtttagaagaaggagaatttcttaacgatgtaatcattgacttttaccttaagtatcttctattggagaaggcatcagatgaacttgttgaacgaagtcacatttttagtagctttttctataaatgcttgacaagaaaggaaaataatttaacagaagataatccagatctatcgtatttggaggtagagtgggaggtgaaacgaaaaacgcaccgtgaattcagtaaaaccaatatggtcgacctgtgccccaaagtccctaagcaggataacagcagtgactgtggagtctatttgttgcagtatgtggagagctttttccaggatcccattgttaactttgaacttccaattcacttggagaaatggtttcctcgccatgtaataaagaccaaacgggaagatattcgagagctcattttgaaacttcacttacagcaacagaagggcggcagctgctagttaatctgtgcacacacgcacccgctccctaagtttcctagaaagccgcttaccagcatctgtgtcagcttacaaagaagaaagcaactcccagtacatcacagattgttgaaatgtacatgcgatcttgtttgagtccttgggctctcccagccgaaggtgatgaacaaagtacttataagatagaaattaaaatctcaaaaatatgatatttttatgactaaatatgcttggattatgcaatagcatatgtaatgtgggaatgttttcctaaataataagcctatgtgatctgtacttccacatgactgggtgttgatgggaggtcggccctccctggtgccagcccagggcttgtcaggtgtgttgacaagtcacatcatattgtaattctaatctttgcagctcaagcatgcagtatgaatactgtgtatttttttttaaaaataacttagtatcaaggcttcagaaaatgccattcacggcatctcttctgtatagtgtgggaaaaaaaaaagaaatattaaaaaattaccctttcaaagtgcagcttattctccattactaaatgcaactactttgctctaatttccttctccacttgtttcaatgtcatatatatagggatctgagaaatgagctcatctgttcatataaaatgtgaaacaaattttaataccaaataagttttaaaatactgtgtagctaagctttgtttatttgatgcatagctatataaatattcattcctacgttaccccaaaatgtgtgtatacagtttctataaaaggtaaaattgataccctcatcattttagcaaagaatacctttaaacttgtatttattatttagaaccaaatatgtgatttttatcgtttggtttacccactgctcatgtgcaaagccagatttttcattgcttttatatttttaagttattgtttttaaagctatatgatcctctgtggatctcacatactcagcacttaacatttgattaaatgttcaggtaacaattgtactgaacttgtgtgtcgatgatagcgtcacctaacaaacagtttagagccttatgctcttagaaatgttctgaaggagacataatcatactgttttctcaaataatgggttttagaatattattttaatcatctcttggatttacagttataactgtatgtaaagcacttgaagcaaatgtaatttaagataaaaccaagaagtctgaaagtttcatttccagtcaagtgacttggttgtcagtcagcctccgcgtcctcggcttctgcagatcttgactctctgcgttgtttgaggtacgtggcttttggagatctcacatgaaaattgttattaattgcataattcattcccaatttatgtgtgttggggagaatttttttaaagtggctgttaattgtgttgtatatctaattttgcaaagcaggtatgtgagacatcttgtaatttctgaactgttttgtttgtgtgtttttcaaagataccatgatcattcatcatgttttggagactgtttaaaatttgttttcctaaattcatgtagaaatgatttgaggatatcaacattttgtattaaacatgttttcaattcattaaattgtaatttttttcttaaa

SEQ ID NO: 86 - protein, 675 aa, Mus musculus
GFLSSPPPPFPSPRGPEVTAPGSGTGGAGGGEDGQGQAWASASFISGPKPSRTGDVPAKEAACGGQKQGDDGGVTPEMAAPHPKDFNTGNKGCDYLEEGTSNKNTSYSYSEMDHTPVSRKRKKRGRSNFHDSHNSKTSLDKPTEHTKEEENDSSVSRKLEESGEDSHQDPAPPEGLAPESLESEATNLRSFAAGQEPDASAASGRASSPNKSLESSASSEVSENSSVAVKGEALTLKEDPGGSSEESQLLISAEPIVVSSDEEGPVEHKNSVILKLQPFIMSENQGTSDPQLSELTLGACESVQVTSELFPYNPDVENISCIKSNSEMDLKLDFIFTCVYIGKIKGTPKGCVTFTKKYIKIPFQVSTNEISLTVDTARLKRFGLWESKDEDHSKRSHAILFLWLSSDYLQDIQTQLENPMLSQQSKANEFIFLELNSSISQREELKLKDIMMEISTKNGNLHLSCPLPWVQALPLFQDLSPQEISFLHYYYASASALPTAAGADMKKKSVSQGGLGVTNEDLECLEEGEFLNDVIIDFYLKYLLLEKASDELVERSHIFSSFFYKCLTRKENNLTEDNPDLSYLEVEWEVKRKTEFSKTNMVDLCPKVPKQDNSSDCGVYLLQYVESFFQDPIVNFELPIHLEKWFPRHVIKTKREDIRELILKLHLQQQKGGSC

SEQ ID NO: 87 - DNA, 189549 bp, Homo sapiens
  misc_feature (1)...(189549): n = A,T,C or G
cctttcccctccccctccctctccaagccggaggggtcctgaggtgacagcgcctgcaactgaaatttcagcagcgggagaagatggacaagagaaagctcgggcgacggccatcttcatccggtgagaaagggtcagagaagggctgaacatattgtctcctacccgggggaaacgggaggcgcaggcggcagctggggttgcggcccgaagccgcgggggcgagggcgggggcggggagaggaaggggcgcgcacaatggaaggctcccgggtcgcccccgcccctggagtcgaagacccggtccgagctgtcatcgaagcctcgggcgctcttcacctcaaaaccccttttattttttccctcctcccgcgaacaccctccttgcgtctcatcggcccatggatcttcccggttggcttgtcactctctgccacgccttcctcgtaattccaccaatgttccaatttcatttcggcttctcagcgcctgaccccactttcctctcttcctttgattctcgactttgcgtcccttcccctctccctcctctttccctcagcaggtagctgctgctggggaggaaaggtggggcttgcgaccggagactccttttctttgatacaatgcctctccgggtctcgttctgctgaacaggcccgcctaatagcctttttcttttccagcctaccctgcgtcttccaaaagtgattggaaagtcaaacaaaggatttgaagccgtgctttcgttgtgtttttattttcagcatattttttgttttggacgttactttgttttaaatgactatcttcagttttgtgtacaacgtcttggaaacaagaaagtggagttataaaaacgtgaggtagagctcctcccagttgagaagtttttatcaaacatttcatccattagggggtcctcaagtccttgtgttaagtcctatggatggtaggaggagaggacgaggactcatatgcttacagtccagtacacaaacgaacgcccaatgaatcaattatttcatttcatttttctgtttctgatggtaccgttggtttctgcagagacagttaacaattacagatttattggccgggcgcggtggctcacgcctgtaatgccaacaccttgggaggccgaggcggtcggatcacaaagtcaggagatcgagaccatcctggctaacattgtgaaaccccgtctctactaaaaaatgcaaaaaattagccgggcgtggtggcgggcgcctgtagtcccagctactcaggaggctgaggcaggagaatggcgtgaacccgggaggcggagcttgcagtgagccgagatcgcaccactgcactccagcctgggcaacagagcgagactctgtatcaaacaacaacaacaacaaaaaaaaaacaaaaaaaaccaattccaaatttatttaggagtgccctgtggcagtgcatctcaaactgctttcagccttaattgcaaaggagagtgattatggatctctggggacactgcttgaagcagttgaaaacctgaaatcccttttcatatgcaaccaatgttatcgatgttcttggtgtatattctggagataatagttttttcctttgaaagcacatgtataaatgatatatatgtatatttatacatacatgtaggtatatgcctccaactgatgagtgttttaatagtctccaccccccaccaaacctctaagtaaaatggacacattaggaaaacgcacaatgcttagctggtgtcatttgcgggcttcctaacacagaactttaggtgtgatcatatcttcctttgagatgcacaaccttttttaaataaatgcatttcatctaggtttaatacatttttgaggagggaaggtaagatatttgccttgtaattcaacaagtcacgttcctttttacctgattacacttagatttatttatttgtcacagtaacttgatgtaagtagttgtgggaagtggattttgataataaagctgttaatccttaaaagacattgatatttacgttagttatatctctagagagcgttttctttttctcgtgatctctcttttggagctgtcctttctgaaaagtaaggtataataaaatccatacccaaatctaatgttacctagctgttctccagtatgcctctagttttaagatgtgcactaattaatttttaagtatgcttctgcttttcttaatagcgtatatttaatttcctgaataaattctcagaaataaaacattggctggttgaaagattccgtgtagtggttgtaggcatgcagttgccatttcattgtaagttgttgctaactggaacccaaatgaagtgacttttttttttttttttttttgagatggagtctcgctctgttgcccaggctggagcgcagtggcacaatctaccacccctgcctcccaggttcaagcgattcttctgcctcagcctccctagcagctgagattacaggtgcctgtcaccatgcccggttaatttttgtacttttagtaaagatggggtttcacaatgttggccaggctggtctcaaactcctgagctcaggtgatccacttgcctcggcctcccaaagtgctggaattacaggcgtgagccaccgtgcccggccatgaagtgacatttatagtcatcaaagtttcctaagtatgcagaagagtttgattaataaaacaggaagaagaggtagaaggaaggtgggtagcagtagaaagataaaataaaacacaaaatttgaagttttatctgtgagactacattaggctgccctaaactttctgctaaacaaggaagaactgtaaaatgttcacagtgtaccgctcaaaactttttcagttgcaagtagcagaaacccaattccagatggtttaagctaaacacatgtatttgtaactcatgtaactgataactataccatttaaagcagtatattagatggtgatacacattaaaaaacggctggcatcagagacaggttcactgaagttgaatgataaagtgtctgggagcaagggagaatgaccattaaaagtgttaaacaacaaaaatacagcacagataaattagaatcatagactgcaattttcaagtgaatttttgaatcaaaataggaaacgtcaagtaaatttgaaccagttttcaactgattgcttcaggcaacattcttggaggcctgtgtcactctcatttgtagttaaggataacgtatgttctttaagtacttaggcactagacattgtgctaagaacttcacaaacttcaatattttcaaaagccttataaggtaattgtttttcatttacagatgagaaaaccgggatttaggggcaggataaagattagtaatagctagtaaggaacagaattcaaaatgtggtctctaattacaaaatctatagttttaacttcatttactgctactagtgtccctgatggtataactttcttaaatctttcagtaggtccaggtgatgtttgctttgcattgaaagtgtaatgaatgataattgaagctcaagatgagaacttaacgattagttatgataaagctgcattatttgcagcaatcttagttgaagtcattggaatgaatggaattgcccacaaaaaatagtatagagtgaggaaggtcttaaatcacatacaactaatttcaaagtgcggaggaagagatattactaagcagttagataggctgattaggattgtgacaggttcgggaagaaagggaggagagtaaaaaaaatgttagcctttcagagagttaaagtagcatgagggtactggatttggcaattaggaggctacttttactgatggtaagagtggttagtagactagtagacaaaagccagatttcaacaggctagaggaatgagtggcagtgaggaaatggggcagcaaaagtaagctgggaaaatgagatgggaaggaaatatttctagaacaagcttgagtaggaaattaggtagaaaggcttgttttttttaggaatatgagagacttaaatcaggttggtagggagtgggaaaggggtggagagggaaagattgaatatatatcaggtaggagataatggagtgaggtcccagaagaaatgggagagagggatgacatcaaagaacagtttggtgagatatagggaaaggagaaaagatggataaagatatagacagatcttgagaagctaaagatattgcagttttggcttctaaaatgaaataaggtaattttttgagaaaggggcttttaaatggtactgggaatgcaagataggtcaattagggatgaatatatattaagtactcttgcagtcttagttatagcaagtgtgagttttatagtagttggagctgttagtactttgtgacttagtagtgccaagcattacaagagcaagagtttggaagaaaaatgagtttaattttacttaaagggtgtggcaagatataagggcaaagagtggatttagtggcagtgaggaagacagtatatagaatgaaaggtttgcatttgagaacttgagagttttccttaaagctgtaaggaacagttttccttaaagcctttcttttatttttttggagacggagtctcactctgccccccaggctggagtgcagtggcacgatctcggctcactgcaagctccgcctcctgggttcatcccattctcctgcttcagcctcccgagtagctgggactacaggagcccgccaccacgcctggctaatttttttttgtatttttagtagagatggggtttcaccatgttagccaggatggtcttgatctcctgacctcgtgatctgcctgcctcggcctcccaaagtgctgggattacagacgtgagccactgcgcctggcctccttaaagccattcttgaatgcgtattgctgaaatggagatatgtagaagtttgtaccattaaatgaagatgagtccattgttttgagtgagttgattaatggatgttttagtgcttcagaatgatggtgaattttgatgatacgtaaactatgaaccaagaatcagagtattctagacatgttggaaaggatcttgggtcagtagatggcagtcataaatatgggcaagggaatatatccaattttttttttttttttttttttttgagatggagtctcgctctgtcgccaggctggagtgcagtgacgtgatctcagctcactgcgacctctgcctcctgggttcaagcgattctcctgcatcagcctcctgagtagctaggactacaggtgagtgccaccatgcccagctaatttttgtatttttagtagagacggggtttcaccatgttggctaggatggtctctatctcttgatatcatggtccacctgccttggcctcccaaagtgctgtgattacaggtgtgagccactgtgcccagccaggaatgtatccaatttatgttaattttaaaggaggaattattgtaataaagttagaatattaataggagatggtggcggtggggaaggagattttttttttgtcttccccccaaaggaaacaatggagattgttcatctctacttctgttttataagtgggagagttttaacaaagtaatatatctaataaaaagctaggatttagttaacctaaggtggaggagaaattcaaggaaaatattcaaaatttaaggaaactgtattgactttggaaaagaatttggtaaactagggaagagatgaagaagatgtagatgagggggtagaattcaattatatgaggtgtgataataagaaggtgataggctatagggattgacaccttggtggtgattcctaggcttgatgatggaaggcagaggattgaaaagtaaattaagggggtatggtaacacagagaatgggttatgaataagattgagtagctccaaagatccagactagaattctgttataatgccttcctgatgaataactttcatttgggttttcagtaatttatgaatctggctgatgtggtctgcttcatcctagttcgtgtgtgctcgtattggtaaatcacccttgggttgtgcctggctccacccatttctgcctgtctaaaccttattcttcaaagcccagctctttttttttttttttttttgagatgggatcttgctctgttgcctaggctggagtgcagtggcacgatcatagctcaatgcagccttgaactcctgggctcaggctatcctcctacttcaggctccggagtagctaggactacaggcccgcactatcatgcctggctattttttaaaaaaacttagtttttctagagatggtgtctcactgtgttacctgggctgttcttgaactcttcgcctcaagcgatcctcccacctcggcttcccaaagtgctgggattataggcatgagccaccatgctcagcccaagcccagttcagttgtgcctttccaagaaccatttccttgattaattcaaacttaaatttatgcctgtttctgcacttctgttggtctttatgcctcttatatgataattatcagattccatcatatattctagcttgctgagttgtctaatgtctacttctatactattaacactgtgacagggactgtcattaattttatttccccatagcatccagtatgcctagagtgtactggtttagagtaccatctctggaatatgaccggtgatggatcactatggtaacgttgggcaagttatttggattcctcaaatcttaatttcttaatctataagatggagattatacattattgatttcatgatataaggattaaggaaaataatttgtgtaaagcacttagcataattccaggcaatgataattactattatgtcaaataaataggctgggtgctgtggcccatgcctgtaatcccagcactttgggaggccaaggtgggcagatcacttgagctcaggagttcgagaccagcctggccaatatggtgaaactctctctctactaaacataaaaaattagccaggcatggtgcttcctgcctgtagtcccaggtactggggaggctgaagcgggagaatcgcttgaacctgggaggtggaggttgcagtgagccgagatcgtgccactgcactccagcgtgggtgacagagcaagactccgtctcaaaaaaaaaaaaaaaaaattatggaataaataagtgaatgagtgggaaaagttatgcttttagttttttgactcatatatttagaatgagagtaattggagagattttcctatatgctaatgctaatatactacagtcttttaaagggagatacttgactataaaatgttatagttaccatttcttttgcactaactatgtgttagtcataatgctaaatgccttaatatggactatcatgctttaatctgaacgattaaaaaggcagatattctccgccattttacagatgagaaactgagactcagagaagtcacaactagtaagccgagatacaaatttaggttgtctagctttaaaatatgtactcttgagcatggtaactataccatacagtctcaagtcgaggcacatcatatgcttatttaaacactccagagctaacctggtataagatggagcaagtcagctataaaaaaattgtaaatttttttattagacaaagttggccaagaagaaaaaaacataaatatttgggaattcacagtagcattaatgaaaggaaataggggaacatactacaaaacaggatggaagcacttttaacccagtgagacatttttgggatataaatttgtaaattaaaatttaagaaactgacattccttttaaaatgacatgtacttttttatttgtataaatttaagggttacaagtacagctttgttatatgggtatattgtgtggtggtgaaatctgggcttttagtgtaatcatcacctgaatagtgtacattgtacccattaagtaatttcttatccctcactgcactgctcctagccttccaagtcttcaatgactgttattccacactctatgtccatgtgtatacacattatttagcccctacttatagtgagaatatgtggtatttgactttctgagttctttttttttcttttttctttttctttttgaaatggtttcgctctgtcgtccagactggagtgcagtggtgcaaaaacggcccactgcagcctcgacctcctgggctcaagcgattctccacatgcctcactgcagccttgacctcctgggctcaagcgattttcccacctcagcctcccaagcagctgagaccacaggtggtgtcactgtacctagctaattcaaataaatatttttagagacagggtctcaccatgtggtgcaggctggtcccaaactcctgggctcaagcagtcatcctgccttggcctcccaaagtgttgggattataggtgtgagcttctaatctgagttgtttcactgaagatgaaggtctccagttctgtgttactgtaaaagacgtgagttcattcctttttcattccggaatagtattccattgtgtatatgtagatatgtgttttgttaaatttaaaattgactagaaaatgaatttctacaggatactttcttatcacttatttaaaaaattctttatttttggtagtcaacttgagtactagtttatttaaattatttgaagttatcaaaagcttaagtgtagaggtgaaaataatttttttttttttttgagatggaattttgccctcgttgcctaggatggagtgcaatggtgtgatcttggctcactgcaacctctgcctcctgggtttgagcgattttcctgtctcagcctcctgagtagctgggattataggcacctgccactacacccagctaatttttttttttttgtatttttaatagagacgggtttccccatgttgaccaggctggtctcgaactcctgacctcaagtgatccaaccacctcggcctcccattagtgctgggattacaggcatcagccacctcgcctggcccaaaaataattttttagatcaggaaaacattacatggtttctcagcaagtgcatgtagtgaaactaatgctgtgtattatgaacttagaagaaatcatttcagcaatatagatttctgggtagtctatatttcattagttattattattatttctgattttaagtaccatacagtacacatatctttagtgtatagttcagtgactttttttttttttaatttgagacagtgtcttgctctgttgcccaggctggagtgcagtggtgccatcatggctcactgcagcctcaactgcctggttcaagtgatcttcccacctcagcctactgagtagctgggagtgcaggtgcacaccaccacactcagctaatttttgtacttttttatgcagacggggtttcacccttttgcccaggctgttctcaaactcctgagctcaagcgatctacccacctcagcctcccaaactgctgggattacaggcatgtgccaccatgcctggcccccatcactgttttaactagtgttaccataggtttattttaactcttcttgaatttctgagaaatagaatcatatactcttctgcatctggtttcctttgagcatgcctgagaaatgtatccatattgtgcgtagcagtaattcattatcttttattgctatacagttttccattatatgaatatgtttatccatacttgatggatatttgggttgtttccagtttttggatattaagaacaaaaatacctgaatattcttatttctgttggttatttatctaaaagtgtaattgttggacattgcataggcaggtgtctaacttcagtagatgctggtgaagcagatgtactcatttacactcttagcaagagtatatgagttccagtctctcaccaatatttggtgttgtcaatctttttacttttacccattctaaaggctgtttaatggttttcattgccatttaaattttgcatttccctagtgattatgaaattgagcacctgtttatatgtttattggccatttggatattctttttttgtgaagtgcctattcagacttttgtccattttgaagataggattatcttgcttttgctttgtaggagttctttatatattctggttatgaattctttgacaaatacatgtattataaatatttttcttttattcttgacatgccgtttcactcttgatgatttttgatgaacagaagttcttttttttttttttttaaatctgagacagggtcttactctgtcacccaggcctggaatgcagtgttgcagtcatggctcactgcagctgtaaccttcccagnnnnnnnnnnnnnnnnnnnnnnnnnnnnnnnnnnnnnnnnnnnnnnnnnnnnnnnnnnnnnnnnnnnnnnnnnnnnnnnnnnnnnnnnnnnnnnnnnnnnnnnnnnnnnnnnnnnnnnnnnnnnnnnnnnnnnnnnnnnnnnnnnnnnnnnnnnnnnnnnnnnnnnnnnnnnnnnnnnnnnnnnnnnnnnnnnnnnnnnnnnnnnnnnnnnnnnnnnnnnnnnnnnnnnnnnnnnnnnnnnnnnnnnnnnnnnnnnnnnnnnnnnnnnnnnnnnnnnnnnnnnnnnnnnnnnnnnnnnnnnnnnnnnnnnnnnnnnnnnnnnnnnnnnnnnnnnnnnnnnnnnnnnnnnnnnnnnnnnnnnnnnnnnnnnnnnnnnnnnnnnnnnnnnnnnnnnnnnnnnnnnnnnnnnnnnnnnnnnnnnnnnnnnnnnnnnnnnnnnnnnnnnnnnnnnnnnnnnnnnnnnnnnnnnnnnnnnnnnnnnnnnnnnnnnnnnnnnnnnnnnnnnnnnnnnnnnnnnnnnnnnnnnnnnnnnnnnnnnnnnnnnnnnnnnnnnnnnnnnnnnnnnnnnnnnnnnnnnnnnnnnnnnnnnnnnnnnnnnnnnnnnnnnnnnnnnnnnnnnnnnnnnnnnnnnnnnnnnnnnnnnnnnnnnnnnnnnnnnnnnnnnnnnnnnnnnnnnnnnnnnnnnnnnnnnnnnnnnnnnnnnnnnnnnnnnnnnnnnnnnnnnnnnnnnnnnnnnnnnnnnnnnnnnnnnnnnnnnnnnnnnnnnnnnnnnnnnnnnnnnnnnnnnnnnnnnnnnnnnnnnnnnnnnnnnnnnnnnnnnnnnnnnnnnnnnnnnnnnnnnnnnnnnnnnnnnnnnnnnnnnnnnnnnnnnnnnnnnnnnnnnnnnnnnnnnnnnnnnnnnnnnnnnnnnnnnnnnnnnnnnnnnnnnnnnnnnnnnnnnnnnnnnnnnnnnnnnnnnnnnnnnnnnnnnnnnnnnnnnnnnnnnnnnnnnnnnnnnnnnnnnnnnnnnnnnnnnnnnnnnnnnnnnnnnnnnnnnnnnnnnnnnnnnnnnnnnnnnnnnnnnnnnnntaagctgttccctaagcatgttgcccagcatgcttagatatgtagtagaactgaaagtgtttttatagaatattctcaacttctaacttctagaatttcacctgcttctacctcccccattataagaatttgtctgatcaaatggttctactactaggtgtgaggtctttggtcagggaatttctgtttagttcttagagccaagttttcctctttcttttctattgtcattatatatatatttatatatataaatattttactggggacattttgtgagaatctgctattcttctgacacatgtagttattttttgacttttatgtttagcccttcagtttctgtaaaatgtgtaaattctaaatctaacaagttaatttaaaacaaaggatgaatgtgaaagaatctcctttgtcaaactgtttatctcatttagatgttaaacgataatttttaccacgtctttggtttttgtagaaatcatcacagaaggaaaaaggaaaaagtcatcttctgatttatcggaggtatgcatttgttttgcttttaacctattatctttggagttactgatattgaaagtattttgctgtttgtctttttaataacattttaaagaaaacagtataaaactttagtcagtgttttgggagagtggtgtattctaattaactgaaggttaaccaggagacttttctaccaactttgtttaaatagttgactagtatactttctggaccagatgaccagtatactttccagagctcattttagattttatttaaaacatagcacaacatttctttgatgacttaatctattagagtaccaatgtgcattcattagtaatgctatagatgcagagtagttgtactcaaggtatgtgctgaacattactattgggaatatgtccttttaagcctctttttttcatttatttcttctacgtaagccaagagtagcaaaacaaacaaaacgaagtttctacctatataggaagtgttttaaaaaattaattccttttaagaaagataatctttttctttttttttaagagacagggtcttgctctgttgcccaggctcaagtacagctcactgcagccttgaactcctgggctttagggatcctcctgcctcagcctcccatgtagctgggaatacagggatgtgccaccatgaccagctaattttaattttttcttgtagagacaggggtcttgctatgttgcccaggctggtctcacattcctggcctcaagcaatcctcctgccttggcctcccaaagtgttgggattatggcataagccaccatacctggcatatagagataattttttttctagaattttgttctttaaatgcagtaatatcccgatttacattataagaatttattaaacccttttctctgaagcagtctaagttatgcacagagaactttaatatgatacgtcttcatgttatatagttatagcatttaacaaagaaggagaagaagtcataaaggaagacaatgagaggaaatcaagagtaccttagaagaccatatagaaagtatggctttagatacactttcttttttggcttaagatttgcatggtgtggtttctccatttaaaactctggatttagtttaagtggggtaaataggaggttaaaaaaaatcttgtgctgaggcgggcggatcatcttaggtcaggagttcaagaccagcctggccaacatggtgaaaccccgtctctacaaaaatacaaaaattggccgggcgcagtggctcatgcctgtaatcccagcactttgggaggctgaggtgggcagatcacgaggtcaggagatcgagaccatcctggttaacacggtgaaaccccatctcaactaaaaataccaaaaattagcggggtgtggtggcaggtgcctgtagtcccagctactcgggaggctgaggtagaagaatggtgtgaacctgggaggcagagcttgcagtgagctgaaatcatgccactgcactctagactgggcgacagagcgagactctgtctccaagaaaaaaaaaaaaaattagctgggcatgatggcaggtgcctgtagtcccagctacttgggaggctgaggcaggaaaatcgcttgaacccgggaggcagaggttgcagtgagccgagattgcgccattgcactccagtctgggtgacagagcgagactctgtcccccgctgccccctaaaaaaaccttacattgccaggatgaatactatcatatctactttgaaatacctctgtattaactaccactatttttgtttttattatatccagtgaagtgaaatatcgtgctttagactattgcattattcatgcaattaatctgaaatcctgccattagaaattaatactgagttaatccatttctctgatttttagatgtactacagtgtttcttaaactttttgtttacaaggaagttgagacttacagaaaagttacagaaattttacagagttcctgtaaaattcactcaggttctcctaatgttatcttatataactacggtatgattacaaaaaacaaggaatttatattgatacagtaccttaaaccagtggtccccaacctgtttggcaccagggaccagtatcgtggaagacagttttcccatggacaggggtcgggaagatggtttcgggatgaaactgttctacctcaaattttcaggcattgggttctcatgaggagcatgcaacctagatcccttgcatgcacagttcacaatagtgtttgtgctcctatgagaatctaatgccactgctgatctgacaggaggggtagtgcaggccctaattctcccgtgctgctcgcctcctgctgtgttgtccttggcctgggggttgggcacacctgctttaaactatagacatcatttggatttcttcagtttcactaatgtcctttttctgttgccagatccaatccaggatcccacattgcatttagttgttaggtctccctagttttcttaagtctatgacaattcttcagtcttttttctttcatgaccatgacactcttgaagaaaactggacagtattttgtagaatatctctcactttgggtttgtttcaggtttctcaagattagattaaggttatgactttttgggaggaataccacagaagtgatgatgaccttcttagtgcattatatcagggggtacatgatagtgatatatcttaatactggtaatatcagccttgattgtttggttaagatgggatctgcctgtttcctccattgtaaagttacttttttcctctttataattaataaatatcttaggggagatgctttgaatctatgcaaatatactatttcttctcaaacttttgtttactattttagcatctatcagtgtatcttgcctccaaatttatatatgtggtattttggtggttttctcttttgcccattcattatagatttatgaatgtaaattcttctataaggggccagtgtggtggctcacaactgtaatcctggcactttgggaggccaaggtgggaggatcacttgaggtcaggaatttgaggccagcctgggcaacatagtgagaccccatatctacaaaaaaaattagctgggcatgttggcatatgcctggaatcccagctacttgggaggctgacataggaagatcgtttgagccaggggagttgaggctgtgatcagctgtgatcgcaccactgcattccagcctggataacagagtgagacactgtctctaaaaaataaaaattcttatgtaaggcagagctgatcctcttcccccacttacttacttacttatttatttatttagagatcctcctgcttcagcttctcaaagtgtgaggattctaggtgtgagccactgtgcttggcttcacttatttatttgtatcaatatggactcatagaatatttagtttattctatgagttataatccactactgtcattacagatttgttggtcaaagtattccagccttgggagatctttcatgttggctgtacccttgtgacgtgctcctatctttttttttttgaacacttactttctgacactgtatattttttggcactgcaagatgcttatgttgtgttttccctgccccaggcttggaatcaaccactttcccagggagccttggttctttcaattgaaggatgatatttagaaacccatgtctgtgtgctaggtatacttgcaactgggatgtcattgtttttaggctttctcaacagacaagactagaaaaatatatgttcacacatacaacatacatatgtctatttattttcccacacaaacacatgtatctatatttatttctgtatctctatctatatatctataaaaaattaatactgatacttctgattccggtccaacaccacaaggcttattctagcttttcctctttccttatttttttctgtctctcattatctacaatatatttacttatttcttaatcccgtaatttatatataaagttgtgttagtgtgtttaaaaaaggtagactttcttagaaaattagcatatttcattattgttagtagtttatattactgccttttccctccaggctgctagtggaaataagttaccaaaaggataagagctttgatggatatagggagaagatactaatacgtgttgaatttaaagtgtttggcctgggcctggtgggttggctcatgcctataatcccagcactttgggaggccaaggcgggtggatcacttgaggtcaggacttcaagaccagcctggccaagatggtgcaagcccatctctactgaaaatacaaaaattagctgggtatggtggtgcatttttgtagtcccatctacttcggaggctgaggtgggaggattgtttgaactcgggggcggaggttgcagttagctgaggttgtgccactgcactttcagcctgggaaacagaacgagactctgtctcaaaaaaaaaaaaaaaaagtgtttgaagtgtttggctgggtgtgggagctcatgcctctaaacccagcacttagggaggccaagatgggaggattgcttgagccacagagcccaggaatttgggactagcctgggcaacaaagtaagaccctgtgtctgcaaaaaataaaaaaattagtcagatatgatggtgcatgcctgtggtcccagctacacaggaggctgatgcaggaagattgcctgggcccaagaggtagaagcagaagtaagttatgtttgagtcactacacaccagcctaggtgacagagcgagaccctgtctcgaataaataaatacatgtttaagaaatatttctaaaatgacactagattgttgtagagatattctaaagttcaattaagaacttatttcactgggtgaattaaggccacccagacacaaccagaattaatactttggtgtgtatccttctagtttatttgtctgtttataagaaacatattaaaaaatagaaaaccacaaaatactgtcttgtaatcttttttcctacttacctatatatcatgaacattattttctgaaatctaatttattaaagcattggtcagtagatatttattgggtattcaacatgtattggacactgtgttaggcataagtaccagggaaacagtggtgaacatttttttcttcgacttttatttaagctcggggtacacttgcaggatgtgtaggatcattgcataggtaaatgtgtgccatggtggtttgctgcaagaacaacccatcacctagatattaaggccagcatccattagctattcttcctgatgctccctctaccggtctgacaggccccagtgtgtgttgttcccccattgtgtccatctgttctcatcattcagctcccacttaaaagtgagaacatgcattgtttggttttctgtttctgcattagtttgctgaagataatggcttccaactccatccatgtccctgcaaaagacacgattgtgttcctttttagggctgcatagtatcctatgtatatatgttttatattttctttattcagtctatcattgatggggatttgggttgattccatgtctttgctattgtgaatagtgttgcagcaaacatgtgcatgcatatatctttgtaatagaatgatttatattcctttgggtatatacccagtaatggtgttgctaggtcaaatggtatgtttgcctctaggtctttgaggaatcaccacactgtcttccacaatggttgaactaatttacaatcccagcagtggtgtaaaagtgttcctttttctctgctacattgccagcatctgttgttttttgactttttaataatagccattctgagtggtgtgagatggtgtctcgttgtcgttttgatttgcatttctctaatgatcagtgatgtcggccacatgtgtgtcttcctttaagaactgtttgttcatatcctttgcccactttttaatgggaattttttttcttataaatttatgttccttgtagactctggatattagagtttgtcagacggatagactgccaaatttttctcccaatctgtaggttgtctgttcactcttttgctgtgcagaagttccttagtttaattagatcccatttatcaatttttgcttttatcgcaattgcttttggcatttttgttatgagatatttgcttgtgcctatgtcctgaatggtattgccttgattttcttgtagggtttttatagttttgtgttttacatttaagtctttaatccatcttgaattaatttttgtatatggtataaggaaggggtacagtttcaatttttgcatatggctagccagttctcccagcaccatttattaaatagagaattatttccccattgcttgtttttgtcaggtttgtcgaagatcagatagttgtaggtgtgtggtcttatttcagagttctctgttctgttccattggtctgttccattgattctgttccaggaatgcgtggtatggcatgatggttgtatagataaaatagtaattttgacaagaatctggagtacttcactagggagagaaggaagagcattctagattgtgggaagagtatatgcaaaggtttagagatataaaataatatgatgtgtttgaagaaggttgatttcattcattgtggttgggttgtagttttgtagtgatgtgatgtgaaagagcccaaatggtaaagagttttacaattgttaagagttttatctgtaagtaatggctaccattgttgaattttaagtattgcagccataattaggttttatgtattagagaactctggggctgacatttgaaaggttaaaaggggaagagacagcagacaagagaatagttaggaagctcttctgattcttcattcaactttcatttgactttcagagtcaaggagaggttttttgtgaataaaattatatttaattgtatataaattaagcactgaatttaaaactccttaaaacagttagcaaattattgatgcagggtagtatagtggttctgttagctgaattagctcttgtatatagttcaattaaactaattattttctcatcctattttcagataagaaagatgttaaatgcaaaaccagaggatgtccatgttcaatcaccactgtccaaattcagaagctcagaacgctggactctccctttgcaggtggtaaataaaattaatttattttaagtatacagttttatttggtatgtttaaaatattgtaataaaactgaatgtttattttctgatatgtcccttttttggttttcttgtgttatttaattgcagattttagttcatttttggcatgttgaaatgatactttgaggttaggctcttcgtttaaaactatgtatatataattatgcataattgattacttcatgaaatttaaatcttattattgtaaaataaattctgttttaagtttactaaaacgataatgtttatagaattgtttgttcttatgcacttgacccattttaagttttaaaatgtatgttttaaggagtaatataactatatttcaaaagctattttgattataaatctggactttatctcatttttaagcattataatcagactttgatgaataaggattaagatagcagttttttgtgttttgttttttaacttttattttaagtttagtggtacaagtgcaggtttgttccataggtaacttgtgtcatgggggtttattgtacagattatttcatcgcccagatattaagcctagtacccattagttatttttcctgttcctctccctcctcccatcctccaacctctgaaaggccccagtgtgtgttgttccctctatgtgtccgcgtgttctgatcattcagctctcactgataagtgagaacatgcagtatttggttttctgttcctgtgttagtttgctgaggataatggtctccagcttcatccatgcaaaggacatgatctcattcttttttatggctgcatagtattctgtggtgtatatgtaccacattttctttatctaaactaccatggaagggcatttaggttctttagagtcagggtctgtgttgctcacactggagtgcagtggcacactcatagctcattgaatccttgaactcctgggctcgagtgatcttgctgcccagcctcctgagtagctgggaatacaagcaggtgcctggctacttaaaattttttttctgtagaggtgggatcttgctatgttgcctaggcttgtcttgaacttctggccttaagaagtcttcctactttggtctcccagagtgctgggattagaggtatgagccattatgcctggccttggaatgtggaagtccaagatgaaggtgctggcagggttgtcttctgaggcctctttacttggattgcagatggctttttctctgggcacacgtacccctagtgtctcttcttcttataaggacattagtcctattggattgggactccacccacatgacctcactcaaccccttttaaggccctgggagttggggcttcaacatatgaattttgggggaatacaattcagtccataactgtagcatttattttaggataacgtgttttaagtaatcttaaaatgtatatttttggttacaagtaaaattaacccttatttatttacgtattttttttttgagacagggtcttgctctgtcacccaggctggagtgcactggcacactcacggctcattgcagcctcagcttcctgggctcaagctgtgctcccacctcagcctcctgagtatctcggattagaggcatgcaccaccatgcttagctagtttctaaaatttttttgcagagacaaagttttgctgtgttgcttaggtgaacctcccacctcagcctcctgaagcgctgggtttacaggcgtgagcccccgcacttggctctattaaccatttttttttttttgagatggcgttttgctcttgttgcccaggctggagtgcaatgtcgcgatctcggctcaccgcaacctctgccttccgggttcaagcgattctcctgcctcagcctccccagtagctgggattactggcatgtgccaccacgcccggctaattttgtattttttagtagaggtgtggtttctccatgttggtcaggctggtctcgaactcccaacctcaggtgatccacctgccttggcctcccaaagtgctggtattacaggcatgaggcaccgtgcccgacctcctattaaccatttctaaaatttgttcttggaggagagatttgtcctcagtattctttgcttaaaattagtgtaaaagaacatttagaaattttgttattaaataatacatttgttggtttgtattggatacaaagagtacataaaaagggaaacaataaaggagaccaggtgacttctgtttacttaaaaagaaaataatatatttgcataaggttagaaaatttgggctgtgtagaaagatacaaggtgggctgtgtgtggtggctcacacctgttatcctagcactttgagaggctgaggtgggaggatctcttgagcccaggagttggagaccagcctaggaaatatagcgagatcttgtttctactaaaaattaaaaaataatctaggcgtggtcttgtgcacctgtagttccagctactcagcaggctgaggtgggaggatctcttgagcccaggatttggagaccagcctaggaaatatagcgagatcctgtttctactaaaaattaaaaaataagctaggcgtggtcttgtgcacctgtagttccagctactcaggaggctgaggtgggaggatcctttgagcccaggagttcaagattaaagaaagctatgattgtgccactatactccagcctgggaaacaatgagaccctgtctcaaaaaaaaaaaaaaaagtataaaatgaagcaaataaaatctcgttctgtcctttttctctaaaggcaaccactattaatgagtttttttcatttatttctagaaaaaagcatatttccatatatatgggtttatactgttttttgatattcgcaaaagttaagtgatacttaaattttgggaaatcgaaatcctgtttgagattggaagtggcatatgtcagccttactgtgctctgtggttggcttaaagttcaccatatttgctaaatatttgctcatactttgtgtagtgtttgaggctgtgcaagtatcttgccgcatttccactactcaacttttttgttgttgtttttagtggttttcaatggaagagaaaggaataaatgcccctttccatagtctttaggagaattttaactcatttattgatttgtttgtgatttttattgacatatagttacattaaacaggcaatcttaagagtaaagttagatgagctctgactagagtaacatattgtcatgctccagaaattttccttgttttcattttatcttttaaaaaaatcaaaagaatttaatatatttttaattaattcatttttcttttttatgtgactcaagtatatgactcaaccattgtgtcttttcctcttctgttgcttgtacctccaccatgattctggcaaccattcttctgatttctgtttccatagttttgcctgttcttaaatttcataaaaatggaatcacataatatgtactcttttgtgtttggcttctttttattcagtataatattgctaacatttatccatgttttgcatctatcactggtttgtttctttttattgctatgtaatattccattatgtgaatatattatggtttatttaattctctattgactgacttttaggctctttttttttttgtttgtttgtttgttttttttttgagacggagtttcccccttgttgcccaggctggagtgcaatggcacgatcttggctcaccacaacctctgcctcccggattcaagcgatttctcccaccacagcctcccgagtagctgggattacaggcatgcaccaccacatcgggctagttttgtatttttagtagagatggggtttatccatgttggtcaggctggtcttgaactcctgacctcaggtgatccgcctgccttggcctcccaaaatgctggcattacaggcgtgaaccactgtgcccggcctgggcttggttttaatttgcatttttgtgatgactaatgacgttaaaaacattttctgtggctgttaggtggagtgttctgtagatgtctattaggtccagttaatcacttccgagtttaagtgagagtctctttgtgagctttctgcctcaatgatctgtctaatgctgtcagtggggtgttgaagtctttcactattatgatgtggttgcctaactaagtctttttgtaggtcaagcaaaacttgttttatgaatctgggtgtaccaatagtgggtgcatatataattagttaagtctttttgttggattttaccatttatcattatgtaatacccatctttgtccttcttaattgttatttgtttaaagtctattttatctgatataagaatagtggctcctgctcttttttattttctgtttgcatggtagatctgtctctttccctttactttgagcctgtgaatgttgttagatgtgagatgggtatcttgaagatagcagatggttgggtcttgtctttttatccaccttgacactccatgtcttttaagagggacgtttagccatttatactcaggattagtattgatatgtgagattttgatcctgtcattatgttgttggttgttgtatagacttgactgtatagttgctttgtagtgtctgtgggctatgtgcttaagtgtatttttgtggtagtaggtgtcattcttctgattccatgtttagtactcccttaaggacctctttcttgtaaggctggtgtagttgaagcaaattccctcagtatttgcttgtctgagaaggattttatttctctttcacttatgaatgttgggctggtaggatatgaaattcttagttgtaatatcttttctttaaggttgcctaaaagaggcccccaatctcttctggtttgcaaggtttctgccaagaagtctgctgctagcctgatgggagttccttctgtacatgacctgacccttctctctagctgcctttaagattttttcttttgcgttgactttggtgaatttgatgacgatgtgccttggcgcaggcaaggctctctctgtcgccaggctggagtacagtggtgcgatcttggctcactgcaacctccacctcccaggttcaagcaattctcctgcgtcagcctcccaagtagctgggactacaggcacatgctgccatgcccagctaattttttgtgttttagtagagacaaggtttcactgtgttgcccaggctggtctcgaacttctgagctcaggcaatccagctgcctcggcctcccaaagtgctgggattgcaggcatgagccaccgcgcctggcctgcatgtcaacctttctattgtgattagggaaatttttgtggaccatatcctcaaatgtattttccagtttgcgtattctctcccattctttctcaggaatgccagtgagtgatagatttagtctctttacataatctcacataaattatccctccactgatgaaatgtttctatacctataaaactctgaagactctgatgaagagttcctagaactgataaaggactttagcaacctttcaggatacaaaatcaatgtagaaaaaatcagtagcatttctagacaccaaataatgtccaggctgagagtcaaatcaagaacacaatcccatttgcaataggcttaaaaaaaatgaaatacctaggagtacagttgactaagaaggtgaaagagtctacaagaagaaccacaagacactgcagaaaaaaatcagagatgacacaaataaatggaaaaacaatccatgcgcgtggattggaagcatcagtgtcacaaaaatgaccatactgcccaaagcagtctacagattcaatgctattcctatcatactatcaatgtcatttttcagagaattagaagaaactattctaaaattcatatggaacaaaaaagagcccaaatagctaaagcaatcctaaacaaaaagaataaagctggaggcatcacagtacctgacttcaaattatattataagcccacagtaaccaaaacagcatggtacaggtataaaaacagacacatagagcaatggaaaagaacagaaaactcagaaataatgctgcacacctacaaccatctgatctttgaaaggctgacaaaaacaaataatggggaaaggattccctattcaataaatgctgctgggacagctggctagccatatgcaacagaatgaaactggacccttaccttttaccatatacaaaaattaactcaagatggattaaagatttaaatgtaaaacctcaaactataaaaatcttaggaaaaatacctaggaaatacccttcttgttatcagccttggcaaagaatttttggctaattccccaaaagcaattgcaacaaaaacaaaattgacaaatgaaacttaatttaattaaagagcttctgcacagcaaaaaaacaaaacaaaatccctaaggaatgggagaaaatattcacaaactattgtctctgacaaaggtctaatatccagattctgtaaggaacttaaatcaacaaatgaaaaaccaataaccttattaaaaaataatatatgtttttacatatatatatgtaaatggtaagtctatttgttttaaggtatggtttaaatccattgtgtcttttttgactttctgtcttcatgacctgtatagtgctgtcagtggagtattaaagtcccccactaatattacgttgctgtctatttcatttcttaggtctattagtaattgttttatgaatttgggagtgccagtgttaggtgtgtatatgtttaggattgtgatattttcctgttggacaaagccttttaccattatataatgcccatctttgtctcttttaactgctgttgctttaaaatttgttttgtctcatataagaatagctactcctgctcgcttttggtgtccatttgcatgaaatgccattttccacccctttaccttaagtttatgtgattccttatgtgctaggtgagttttctgaaggcagcagatggttggtgagttcttatccattctgcagttctgtatcttttaaatggagcatttaggccatttacattcaatgttagtattgaaatgtgaggtaccattgcattcatcatacttttgttgctggtgtacttgggttttttgtttttgctttttaacttgtatttttattttataggttctgtgtaatttatgctttgaagaggttctgttttgatgtgtttccagaatttgtttcaagatttagagctccttttctcagttcttgtagtggtggcttggtagtggcaaattttctcagcgtttgcttgtctgaaaacaactgtatctttccttcataaatgatacttactttcgttggatacagaattcttgtctgataattgtttgtttgaggaggctgaagatagccccaattcccttctagcttctagggtttctactgataaatccactgttaatctgataggttttccttataggttagctggtgcttctgtctcacagctcttaagattctttcctttgtcttgtctttcggtaacctgattgccgtgtgcctaggtgaagatctttttgtgatgaaatttccaggtgttctttgtacttcttgtgtttggatgtctaggtctctagcaaggccagggaagttttccttggttattccagaatatgttttccaagcttttagaattctcttcttcctcagcaacactgattattcttatgtttggtcgtttaacataatctcagacttcttggagactctgttcatattttcttgttcttttgtctttgttggattgggttaattcaaagaccttgtcttcgagttctgaatttctttcttcctacttgtttaattctattgctgagactttccagagcatttcacgtttctaaaagtgtgtccaaagtttcctgaactttttattgttttttttctttaagcgatctatttccttgaatatttctcccttcacttcttgtatcattttttggatttccttgcattggacttcacctttctctggtccctccctgattagctttatgactatcctcctgaattatttttcaggtaaatcagggatttcttctgggtttggatccattgctggtgaactagtgtgattttggtggggggttgttgaagagccttggtttgtcatattatcagagttgtttctggttccttctcatttgggtaggctctgtcagagggaaggtctagggctgaaggctgttgctcagattcttttgtcccatggcatattcccttgatgtagtactctcccccttttcctatggatgtggcttcctgtgagctgaactgcagtgattgttgtctctcttctgggtctagccacccagcgagtcttcccagctctggcctcatactgggggttgtctggacagagtcctgtgatgtgagtcatcgatggatctctcagccgtggataccaatgccttttccagtggaggtagtggcggggtgcaatggactctatgagggttcttagctttggtgttttaatgttctatttttgtgctggttgacctcctgccaggaggtgaccctttccagaaagcatcagctatggtaggatagagaggcactggcggtgggagagactctagaactcccaaggttatatgtcctttgtcttatgctaccagggtggatagggaaggaccatcaggtggaggtggggctaggcgtgtctgagctcagattctacttgggtgggtcttgttttggctgctgtggggggtgtgggtgagattcccaggtcattggagttgggtacctaggaggattatggctgcctttgctgagtcatgcaggttgtcagggcagtgggggaaagctgacagtcacagacctcacccagctaccaggtaaaatgaagggccggtctctgtcccactgtgctcccctcaacagtcccaagtctgtttccagtctgagggtgtgaatgggcttctcaccccgttcaaatggttagaaagttctgctagagatttccttctccctgtggagttatacccctgctcctctggtcatccacccaatggattcctgtggtgccaggcaggaatggcttgctaggggacgcagcgagctcccagggcctttttgctgcttcctctacccctgtatttcacctggctctctaaattggctcagctccaggttaggtcggaaacttctcccgcaaacagaccttcagcttctccattgggggcacgtgttcgggagagggaggtctccctttcccacttccgcagttggggcactcacagtatttggagtgtctcctgggtcctgcaggagcagtccacatcctttagagggtctgtgggccctctcgggattgctggtttgttgttgctgtcgatctggggctaaaatccacaatgagagcttctgcaagctgctctgcatgtagctgcaatctggtcctgcctcctgtccaccatgatgatttcaagctgttcattttcttactgttgagttgtaagagttcttcgtatatttagataacagtcctgtagcagatacgtcattttcaaatattttctctcagtctttggcttgccttctcattctcttgacattgtctttccagagcagaaatttttaattttaatgaagcccagcttatcaattcattctttcatggattgtggctttggtgtcatgtttaaaaagccattgatagactcaaagtcatctagattttctcctatgttatcttctaggagttttatggttttgcattttgcattcaggtttgtgatccagtttgagttaatttttttttttagacagagtcttgctctgttgcccaggctggagtgcagtggtgtaatttcagcttactgcaaccgccgtctcctgggttcaagcaatctcatgccacagtcttctgagtagctgggattacaggcacctgccaccatgtctggacctggctaatttttgtatttttagtagaggtgaggtttcaccatgttggccaggctggtctcaaactcctgacttcaagtgatcagccagcctcggcctcccaaactgctgggattacaggtgcaagccaccatgcccagcccagtttgtgttaatttttatgaaggatgtgaggtctttgtccagatcattcttttgcatgtggatattcagttgctctagcacagtttgttgaaaataccgttttctttttaataatttgaactttcagactcagctagtacatatgcaggtttgttacatgggtatactgcttgatgctgaggtttagggtactattataccgtcacgcaggtaggaagcatagtatccaatagttagtttttcaacccttttcccaccccctttattccccactagtagtccccaatgtctgtttttgccatctttatgtccatgattacccaatgtttagctcccacactggatgctcatggacataaagatggcatgggtggccataagtgagaacatgtagtattttgttttctgttcctgcattaattagcttaggtgatcctatgttgctgcacaggacatgatcttgttctttttttatggccgcatagcattccatggtgtgtatgtaccacttttttttaatccagtccaccactgatgggcacctaggttgattccatgtctttgctattgtaaatagcgctgcagtaaacatttgactgcatgtgtctttttggcagaatgatttattttcttttggacatatactcagtaatgggattgctggttcaaatggtaggtctattttaagttctttgagaaatttccaaactgctttccacagtggcagaactaattcccaccaacagtggataagcattcccttttctttacagccttgccagcattcgttgttgttgttttgactttttagtaatagccattctgactggtgtgagatggtatctccttgtggttttgatatggattgaaaggaacttttttcattctattgcttttgcctcttggccaaagatcagttgactgtatttatttgggtctatttttgggctgtatgttctgtttctttgatctatttattaaaaaaaataaaaagataggtcaccatagtgtctaagaaaaaataaaaaaatattctttcacccataccacactctcttgattagtgtagctttataataagtcttgaagtttggcagtgtcaatcctctatgtttttctctttaaaaattgtgttttttatgcctagtcgtttgcttctctataaactttctagtcagtttgttgatatccacaaagtaacttgctgggattttgattgacattgcattgaatctgttgatcaacttgtgaagacatgacatctgaataatattgactcttcttatccatgaacatggaatatttttctgtgtatttggttctttgatttctttcatcacagttttgtagctttcctcatacagatcttgtacatattttgttagagttataccaaagtatttctttcttttttttttttttgttgagacagagtctcgctctgtcgcccaggctggagtgcagtggtgcaatctcggctcactgcaagctccgtctcctggattcatgccattctcctgcctcagcctcccgagtagttgggactacaggtgcccgccaccacacctggctaatttttttttgtatttttagtagagacagggtttcaccttgttagccaggatggtctcgatctcctgacctcatgatctgcccacctcggtatcccaaagtgctgggattacagacatgagccactgcgcctggccaagtatttcattttttatgtgctaatgtaaacgatattgtgtttttaatttcaaattccagttatttatgcaggcatataggaaggtgattgacttttgtatattaatcttgtatcatgcaacctcgctgtaattgcttattggtttcagtttttttgttcattcttttggaatttccacatcgacagttacgtcatctgcaaacaaagacagttttatttcccaatcagcatatctttttaaaaagttataaatatttgtatatatttatggcatacatgtgatattttgttacatgtgaagaatgtgtaatgaccaaatcagggtgttgaggatatccatcatcacaagcatttattatttctatgtattgagaacatttcaagttcttacttctagttactttgaaatatacaatacattgatgttaactatagtcaccgtattctactactgaatattagaacttactccttctatctagctgtatgtttgtagccattaaccaacctctctccattgtgacctctcccctctacacccttcccagcctctagtatctataattctaccctctaccttcatgagatcaactttttcagcacccacatatgagtgaatacatggaatatttttctttctgtttctggcttacttcacttaacataatgaccttcagttgcgtccatgtttctgtacatgacagaattttattcttttttatggccaaattatgtttaattgtgtaaatacaccatattttctttatccgtttgtccattgatgggcagtttggttggttctatatcattgctgttgtgagtagtgctgcagtaaacatgggagtgtatgtatcttattgaaatattgttttcctttcctttggataaatacccagtagtgggattactgtatcatgggttagttctatttttagtttttttttttttttggggaaatctccatactgtttttcataatagctatactaatttacattcccaccaacagtgtatgtgagttccttttttcctgcatcctcaccagcatctgttttttttttttgtctttctgataatagctattctgactgggataagacgatatctcattgtggttttatttacatttccctagtggttagtgatgttgagcattttttcatgtacctgttggccatttgtatgtcttttaagaaatgtctattcatgccctttgcccactgtttaacgggatttgttgtttttgttgagtttttgagttccttgtgtattctggatattagtcccttatcagatgagtattttgcaaatatttctcctattctttagactgtctcttcattctattgattgtttccttagccgtacagaagccattgtctatttttgttgctttgcttttgaggtcttagtcataaaatctttgcctagaccgatgtcctgaggtgtttccttttagtagttttatagtttcaggtattatatttaagttgtcaatccatcttaagttgatttttgtatatggtgaggaataggggtctggttttatttttctgcgtatggatatcctgttttctcagcaccatttattgaagagggtgttccttacccagtgtatgttagggtgcctgagttgaaaatcattttactttaaatacgtggatttatttatgagttctttattctgttccattgctctgtgggtctgtttttaataccagtactatgctgttttggttacattgccttataatatagtttgaagtcaggtagtatgatgcctctagctttgttctgttttctcaggaatgttttggcaatttggattcttgtttccatacaaattttaggtttattatctttcattgctatgaaatagtcattggtcttttgatagggattgcattgaatctgtagattgctgcatagtatggtcattttaacaatatgaattcttccagttcataagcatgatatatcttgcatttgttcctatcctcttcagttttttccattagtgttttgtagttttcctcatggaggtcttttacttctttggttaaatttattcctagttttttttgtttgtgtgtgtgtgtgtgtgttttttttttttttttttttttttttttttgtagctgttgtaagtggaattgctatctggatttcattttcagttagttcattgttggtgtataaaatcactacttttttttttttttttgacagagtctcactctgttgtccaggctggagtgcagtggcatggtctcggctcactgcatcctccactttctgggctcaggtgatcccacctcagcctccctattagctagcacataatcactacatttttgatgttgattttgtgtcgttcatcatatctgcatatgagatctgagtctttcttttttttttttgacacagtttcactctgtcacccaagctggagtatagtggcatgatcatctgcaagttcactgcatcttcctgggcacaaggaaaccatcctcctgcctcagcctctcaagtagctgggactacaggcacgtgccatcatgcctggctaatttttattgtttaaaattgttttgcagaggatggtgtcttgccatgttgctcaggctggtcttgaattcctgccttggcctcccaaagtgctggaacagcaggcgtgagccactgcacccagctgagatctgagtcttttttggtgaagtttttaggtttttctaaatataagatcgtgtcttctgcaaagagggataattttacttcctctttttcaatttggatgtcttttattttttctcttgcctgattgctccggctaggacttccattactatgttgaataagcatggtgaatatgtgcatcctgttttgttccagttcttagagggaagtcttttagcttttcttcattcagtgtgatgttagctgtggatttgtaatatatgacctttatcctgctgaggtatgttctttttatagctagtttcttgagcatttttatcataaagtgagacattattttatcaaatttttttttgcatctgttgaggtgactgcatggtttttgtttttcatcctgttgatgtgatgtgtcatgtttattgatttgcatatgttgaaccattcttgcatctctgaatacaatctcacttagattatggtgtattatctttttaaagtgcttttggattcggtatgctattaataatattttgttgaggtattttgtgtctgttttcataagggatattggctggaagttttcttttttgtgtgcatttccttgtcttcttttggtataagggtaggaatgacttcgtagaatgagttaggaagaattccatcatcttctattgtttggaatagtttcagaagatttggtattcttctttgtaagtttggtagaaattggcaatgaagccatcaggtcgtgggcttttcttttttgggagcctttttattattcaaccttttaaaattttctttagtgacagggtcttgctctgttgtccaggctgtagtacagtggcatgatcattctccttgtagcctagcttagaattcctgggctcaagtgatcctctcacctcagcctcctgagcagctagtatcacaggtatgcacgaccatggctggctaattaaaaatttttttttggtagaggtggggtcttgctgtattgcctaggctgttcttaaactcctggactcaagcagtcctcccaacttggcctttcaaagcgctgggattgcaggcataagccactgtgctggcctactcactcagtcttgttatttgttattgggttgtttagggtttctgtttctttctggttcagtctcgataggttgtatgtgtccagaaatttatctatctttttctaagtttttcagtttgttagctcgtagttgttcatagtagtctctgataatcttttgtatttctctggtatcaattggaatgtctcttttttcatttctgattttgtttattagggtatgtgtgtgtgttagccagtctagccagttgtttatcaagattatctttaaaaaaaacaacgctttttttcattgattctttgtattatatttttagtctttctgttttctttagttttgctctgatgtttatttttttttctctactaacttttttttttttgagatggagactcactctgccacccaggctggagtgcagtggcgtgatcttggctcactgcaacctctacctcccaggttcaagtgattctcctgcctcagtctcccaagtagctgggattacaggcacccaccaccacactcagctaatttttgtatttttaatagagagggcgtgtcaccatgttaaccaggttggtctcaaactcctgacctcaagtgatccacccacatcagcctcccaaagggctgggatcacaggcatgagctaccatgtccggccatttactaattttgttttggcttgttctgacttttctatttttttcaggtgcattattaggttttttttacttaaaatctttatacttttttgtcatacgtatttattgctataaatttctctcttaatagtgcttttgcagttacaggttttaaatgctgaatttatatttttacttgtttcaagatgtttcttgatttccctcttaatttcttccctgactctggtcattcagaagcatgttgtttaatttccatgtatttgtattgtttccaaagttcttgttattggtttctaatttttttttccattgtggtctgcaaaggtactcatattattttgatttttaaaaatttggtgaggttttaggtaataccattcagggcataggcatgggcaaagacttcatgactaaaacacaaaaagctattgcaacaaaagccaaaattgacaaatgggatctaattaaactgaagagcttctgcacagcaaaagaaactatcatcagagtgaataggcaacctacagaatgggagaaaatttatgcaatctatccatctgacaaaggactactatccagaatctacaaggaacttaaacaaatttacaagaaaaaaacaaataaccccatcaaaaagtgggcgaaggatatgaacagacacttctcaaaagaagacatttatgcggccaacaaacatgaaaaaaagctcatcatcactggtcattagagaaatgcaaatcaaaaccacaatgtgataccatctcatgccatttagaatggcaatcattaaaaactcaggaaacaacagatactggagaggttgtagagaaataggaatgcttttacactgttggtgggagtgtaagttagtttaacccttgtggaagacagtgtggcgattcctcaaggatctggaaccagaaataccatttgaccaagcaatcccattactgggtatatatacccaaaggattataaatggttctactataaagatacatgcacatgtatgtttattgtggcaccattcacaatagcaaagacttggaaccaacccaaatgcccatcaatgatagactggattaagaaaatgtggcacatatacaccatagaattctatgcagccataaaaagaatgagttcatgtcctttgcagggacatggatgaagctggaaaccattattttcagcaaactaacacaggaacagaaaaccagacactgcatgttctcactcataagtgggagttgaacaatgagagcacatggacacagggcggggaacatcacacactggggcctttgggggattgggggtaaggggagggatagcattaggagaaatacttaatgtagatgacgggttgatgggtgcagcaaaccaccatggcacatgtatacttatgtaacaaacctgcatgttctacacatgtatctcagaacttaaagaataataataataaaaaaactggcaatgttacctttgtggcctaacatatggagaatgttctttgtgctcgtgagaagagtgtgtaatctgtagctggtggatgaaatgttctgtagatgtctcttaggtccatttggtctatagtgcagaaatgttcaattttttttggtttattttccttctgcatgttgaaagtgggatgtttaattctccaagtatcattgtattgggatttatctctctctttagttctcatatttgctttatttatctgagtgctcctgtattgggtgtaaatatgtttataattgttatgttctcttgctgaatttatctcttcatcaatatatgatgacctttttgtttctttttatttttatttcaagttttgcaatatatttttttccttcaattttattttaagttccagggtatacgtgcaggatgtgcagatttgttaaataggtaaacgtgtgccatggtgttttgctgcacagatcaacccttcacctaggtattaagaccagcatccattagctgttcttcctgatgttctttttcccttcgtccccctgacaggctccagtgtgtattattccccaccagtgtgttctcattgttcaactcccacttatgagtgaggacatgtggtgtttgtttttctgttcctgcattagtttgctgaggataacggcttccagctccatccatgtccctgcaaaggacatgatctttttcctttttatggctgcatagtattccctgatgtacatgtaccacatttttttaatccagtctgtcattgatgggcatttgggatgattccgtgtcttggttattgtgaataatgctgcagtgaacatatgtgtgcatgtatctttataataaaatgatttatattcctttgggtgtatacccagtaatgggattgctgggtcaaatggcatttctgcttctagatctttgaggaatcaccacactgtcttgtctctttttaagtttttttggtaacttaatgcctatttgtctgatgtaagtatggctactcctgcatacttttggtttccatttacatgggatatatatatgtatccatcacatcccttcactttcacttcatgtgtgtctttataggtgaagtgagtttcttgtaggcagcattctgttgggtcttgtgttttatctattcagccagtctaaatcttctaattgtggagtttaaaccagttacattcaggttgttattggtagtgaagacttattcctctcatatacctcaaaataataagaaccatgtatgacaagcccacagccaacatcatactgaatgggcaaaagctggaagtattccccttaaaaactgccagaagaccaggatgcccactgtcatcactcttattcaacatagtattggaagtcctggccaggacagtcaggtaagagaaaggaataaaggcacctaaataggaagagaagaagtcaaactattcctatttgcagacagcatgatcctagatctagaaaaccccatattctcagcccaaaggcttcttaaactgataagcaacttcagcaaagtctcagcatacaaaatcagtgtccaaaaatcactagcactcctatataccaacaacaatcaaactgagagccagactaggaacgaactcattcagaactgccacaaaaagaataaaatacctaggaatacatctaaggagggaggtgaaagatctcttcaaggagaactacaaaacactgttcaaagaaatcagagatgacacaagcacattccatgctcatggataggaacaatcaatatttttaaaatggccatactgcccaaagcaatttatagatttaatgctattcttatgaaactaccaatgacattctttacagaactagagaaaactattttaaaattcatatggaaccaaaaaagagcctgaatggtcaaggcaatcctaagcaaaaagaacaaagctggaggcatcatgctatccaacttcaagctatgctacaggcacactgaccaatggaacagaatagagagcccagaaataagactgcatacctacaactatctgatctttggcaaacctgacaaaaacaagcaatggggaaaggattccttattcaataaatggtgctgggataactggttagccatatgcagaaaattaaaactagaccccttccttagcccatatacaaaaattagctcgagatggattaaagacttaaatgtaaaacctcaaactgaaaactctggaagacagcctaggcagtaccattcaggagataggcacgtgcaaagatttcatgataaagataccaaaagcaattgggacaaaagcaaaaattgacaaatgggatctaactaaactaaagagcttctgcacaccaaaagaaactgtcaacagagtaaacagacagtgtacagaatgggagaaaatttttgcaaactatgcatctgacagaagtcgaatatactgcatctataattaacttaaacaaatttacaagcaaaaaacaaccccattataaagtgggccaaggggggcatgaacaagtgcttttccaaagaagacgtacatgcagccaacaatcatatgaaagaaagctcaacatcactaatcattagagaaatgcaaatcaaaaccacagtgagataccatctcacactagtcaaaattgctactattaaaaactccaaaagtaacagatggtggtgaggttgtggagaaaaaggaatggttataaagtgttggtgggagtgtaaattagttcacccattgtggaagacaatgtggccattcctcaaagatgtaaagacagaagtaccattcactccagcagtcccattactgggtatttacccaaaggaatatacattgttctattataaagacacatgcacacatatgtttattgcagcagtatttataatagcaaagacatggaatcaatctaaatgcccagtaatgttttactggataaagaaaatgtggcacatatacaccataaaatgagatcatgtctgttgcagggacttgaatggagctggaggccattatccttagcaaactaatggaggacagaaaaccaaacactgcatgttctcacttataagtgggagctaagttatgagaatacatggacacagaaggggacaacacatgctagagcctttcagaaggtggagggtgtgaggaggggagagcatcaggtaaaatagctaatgagtactaggcctaatatctgggtcataaatattctgtataacaaccccccatgacataagtttacctatgtaacaaacctacacaggtacctctgaaattaaaagttttaaaaaaaggacttactcattttgttaatgattttctgactgcttttatatctctatttctctattcttttattgtttacctttatgatttggtggtttttaaaaaattattttttattatactttaagctctagggtacatgtgcataatgtgcaggtttgatacataggtatacatgtgccatgttggtttgctgcacccatcaactcatcatttacattaggtatttctcctaatgctatccctcccccagctccccaccccgcgacaggtcccagtgtgtgatgttccccgccctgtgtccaagtgatctcattgttcagttcccacctacgagtgagaacatgcggtgtttggttttctgtccttgtgatagtttgctgagaatgatggtttccagcttcatccatgtccctgcaaagaacatgaactcattttttttaaggctgcatagtattccatggtgtatatgtgccacattttcttaatccagtctatcattgatggacatttgggttggttccaagtctttgctattgtggatagtgctgcaataaacatatgtgtgcgtgtgtctttatagtagcatgatttataatcctttgggtgtatacccagtaatgggattgctcagtcaaatggtaattccaggtctagatccttgaggattcgccacactgtcttctacaatggttgaactaatttacattcccaccaacagtgtaaaagcattcctatttctccacattctctccagcatctgttgtttgctgactttttaatgattgccattgtaactggcgtgagatggtatctcattgtggttttgatttgcatttctctgatgaccagtgatgatgagtgttttttcatgtgtctgttggctgcatagatgtcttcttttgagaagtgtctgttcatatcctttgcccactttttgatgagggggttgtttgtttttttcttgtaaatttgagttctttgtagattctggatattagccctgtgtcagatgggtagattgtaaaaattttctcccattctgtaggttgcctgttcacgctgatggtagtttcttttgccatgcagaggctctttagtttaattagatcgcatttgtctattttggcttttgttgccattgcttttggtgttttagtgatgaagttcttgcctatgcctatatcctgaatggtattccctaggttttcttctagggtttttatggttttaggtctaacattgaagtctttaatccgtcttgaattaatttttgtataaggtgtcaggaagggatccagtttcagttttctacatatggctagccagttttcccagcaccatttattaaatagggaatcctttccccatttcttgtttttgtcatgtttgtcaaagatcagatgattgtaaatgtgtggtgttatttctgaggcctctgttctgttccattggtctatatctctgttttggtaccagtaccatgctgttttggttactgtagccttgtagtatagtttgaagtcaggtagtgtgatgcctccagctttgttctttttgcttaggattgtcttggcaatgtgggctcttttttggttccgtatgaactttaaagtagttttttccaattctgtgaagaaagtcattggtagcttgatggggatggcattgaatctataaattactttgagcagtatggccattttcatgctattgattctccctatccatgagcatggaatattcttccatttgtttgtgtcctcttttatttcattgagcagtggtttgtagttctccttgaagaggtccttcacatcccttgtaagttggattcctaggtattttattctctttgaagcaattgtgaatgggagttcactcatgatttggctctttgtttgtctgttaagggtgtataagaatgcttgtgatttttgcacatttattttgtatcctgagactttgctgaagttgcttctcagcttaaggagattttgggctgagacaatggggttttctaaatacagaatcatgtcatctgcaaacagggacaatttgacttcctcatttcctaattgaatactctttatttctttctcttgcccgattgccctggccagaacttccaatactatgttgaataggagtggtgagagagggcatgcctgtcttgtgcccgttttcaaagggaatgcttccagtttttgcctattcagtatgatattggctgtgggtctgtcatagatagctcttattattttgagatacgttccattgatacctcgtttattgagagtttttggcatgaaggtttttaattttgtcaaaggccttttctgcatctattgagataatcgtggtttttgtcattgtttctgtttacgtgatgcattacgtttattgatttgcatatgttgaaccagctttgcatgccagggatgaagccgacttgattgtggtggatacgctttttgatgtgctgctggattcggtttgccgaatctccttgtgtctctatctccttcagttctgctctgatcttagttatttcttgccttctgctagcttttgaatttgtttgctcttccttctgtagttcttttaattgtgatgttagtgtgtcgattttagatctttcctgctttctcttgtggacatttagtgctataaatttccctctacacactgctttaaatatgtcccagagattcttgtatgttgtgtctttgttctcattggtttcaaagaacatctttatttctgccttcattttgttacttacatagtagtcattcaggagcaagttgttcactttccatgtagttgtgtggttttgaatgagtttcttaattctgacatctaatttgattgcactgtggtctgagagacagtttgttgtgatttctgttcttttttttttttttttttttttgagacggagtcttgctctgtcgcccaggccggactacggactgcagtggcgcaatctcggctcactgcaagctccgcttcccgggttcacgccattctcctgcctcagcctcccgagtagctgggactacaggcgcccgccaccgcgcccggctaattttttgtatttttagtagagacggggtttcaccttgttagccaggatggtctcgatctcctgacctcatgatccacccgcctcggcctcccaaagtgctgggattacaggcgtgagccatcgcgcccggccgtgatatctgttcttttacatttgctgaggagtgctttacttcgaattatgtggtcaattttagaataagtgtgatgtggtgctgagaagaatgtatattctgttgatttggggtggaaagttctgtagatgtctattaggtctgtttgttgcagagctgagttcaagtcctggatatccttattaaccatctgtctcgtttatctgtgtaatattgacagtggtgtgttaaagtctctcattattgttgtgtgggggtgtaagtctctttgtaggtctctaaggacttgctttatgaatctgggtgctcctgtattctctaaggacttgctttatgaatctgggtgctcctttattgggtgtgtatatatttaggatagttagctcttcttgttgaattgatccctttaccattatgtaatggccttctttgtctcttgatctttgttggtttaaagtctgtttatcagagactaggattgcaacccctgctttttttttgctttccatttgcttggtagatcttcctccatccctttattttgagcctaagtgcgtctttgcatgtgagatgggtctcctgaatacagcacactaatgggtcttcccatcagtgactctatccaatttgccagtctgtgtcttttaattggggtatttagcccatttacatttaaggttaatattgttagtgtgaatttgatcctgtcattatgatgttcgctggttattttgcccgttaatttatgcagtttcttcatagcactggtggtgtttacaatttggcatgtttttgcagtggttggtaccggttgtttctttccatgtttagtgcttccttcaggagctcttgtaaggcaggcctggtagtgacgaaatctctcagcatttgcttgtctgtaaaggattttatgtctccttcacttatgaagcttagtttggctggatattaaattctggattgaaaattcttttctttaagaatgttgaatattggcccccactctcttctggcttatagggtttcttccgagagatccaccattagtttgatgggcttccctttgtgagtaactcgacctttctctctggctgcccttaacacttttcccttcatttcagccttggtgaatctgacaattatgcgtcttggggttgctcttctcacagagtatctttgtggtgttctctgtatttcctgaatttgaatgttggcctgccttgctaagttggggaagttctcctggataatatcctgaggagtgttttccaacttggttacattctctccatcactttcaggtacagcaatcaaatgtagatttggtcttttcacatagtcccatatttcttggaggctttgtttgtttctttttactcttttttctctaaccttgtcttcttgctttatttcattaatctgatcttcaatcactgataccctttcttccacttgactgaattgtctatcgaagcttgtgcatgtgtcacgaagctctcgtgccatggttttcacctccatgaggtcatttaaaatcttctctacactctttattctagttagccatttgtctaatgttttttcaaggtttttagcttccttgcgatgggttcaaacatccttctttagcttggaatagtttgttattactgatcttctgaagcctatttctgtcagctcgttaaagtcattctccatccagctttgttccgttgctggtgaggagctgtgatcctttggaggagacgaggtgctccgatttttagaattttcagcttttctgctctagtttctccccctttgtggttttatctacctttggtctttgatgttggtgacctacagatgaggttttggtgtagatgacctttttgttgatgttgatgctattcctctctgtttgttagttttccttctaacagtcaggtccctcagctgcaggtctgttggagtttgctggaggtccactccaggcccagtttgcctgggtatcaccaatggaggctgcagaacagcaaatattgcagaagagcaaatattgctgcctgatccttcctctggaagcttcgtcccagaggggcagccacctatatgaggtgtctgtcatcccctaatgggaggcgtctcccagttaggctacactggggtcattgacccacttgaggaggcagtctgtctgttctcaaagctcaaacgctgtgctgggagaaccactgctctcttcagagctgtcagacagggacgtttacatctgcagaagttgtctgctgccttttgttcagccatgccctgcccgcagaggtggagtctagaggcagtaggccttgttgaactgtggtgggctctgccctgttctagctgcccggccactttgtttacctactcaagcctcagcaatggcggatgcccctcccccagccaggctgccgtcttgcagtttgatctcagagtgctgtgctagcagtgagcaaggctttgtgggcgtgggacctgccgagccaggcacggggagagaatcaccttgtctgctggttgctaagaccttgggaaaagtgcagtatttgggcgggactgtcccatttttccacgtagcctgtcacagcttcccttggctaggaaagggaagtcccctgactccttgcacttcccgggtgaggcgactccccgccctgcttcagcttgccctctgtgagctgcacctactgtccagccagtcccagtgagatgaaccaggtaccgaagttggaaatgcagaaatcacccatcttctgcgtcaatcatgctgggagccgcagactggagctgttcctatttagccatcttggaatgcccgattttgtggctttttgtagtgataacatgtgactccattctctgtcttatttgtgtgtctgctctactattgagttttatacttttgtgtgtttctttgagagttttaagactctattaagcatttttgtagtgtagtgtgataaattcccttagcttttgcttgtctgggaaagatgttatttgtccttcatttttgaaggataggtttgtggatctggtattattgactgacattttattttcagcacttgtaatatatcatcatatgcctgtaaggtttctgctgagaaatttgtttttaatcttatggggattttcttatgtgtgatttgatatttttcttgctatttttagaattgtgtctttgacttttcacagtttgactatgatataccttgtagaagccttttatggattgaatctatttgaggaattttgtactcctgtatcttcatgtttttgtcttttgcaagacttgggaagttttcagctattatttttttcaaatgttttcttccatttctctttcttctgaaactcccataatttgaatatttggtcgctttatggcatctcatatgttatgtaggctttcttcattttttaaagttgttttttactgttatgtctgaatgggttatttttttaaaaatctgttttcaagttcagaaattcttctgcttaattttgtctattgttgaggctctcaactgtattttatatttcattgaaatcttcagttgtaggacgttttaaatgatatcaatctttgttgaatttctaatcgagatcataaattgttttcataattttttggattatttactttttaaaaaatatctcacttagtttcttttgtatcagaattttgattttttttccagcattccatacatttccttttcttatgggtctcttattggaaaattattttgtttctttggaggtgtcttgtttccttgctttttcatgtttctcatgtctttttgttagtgtctgtgtttatttcaacagctgttttcttccaatttaccattaacattggtagggaaaaactttttcctatagatatatttatagtgctggttctgtgaagtggtttgtctgatttttacatagacacagtcatgtaatcttttatgattttttggattgtaactcatgtcagcagtgtcacagttcctaagtgatgcagactgcttttgttaatggcagccatggtgaggctttgctgagcatgaggactccaggtgggctgttccttaagcaccagtagtaatggcagtgggctaggtggacttgtcattagttgcctgagtggtgtgtgtggatgccagtatggctgggtgtgttgagccaatccccagacctctaaatgatttgtgtaggcaatggcagtggcagctataggtggagttggcttgtcctcaggtttttggaaggcatgtgtctgagccagtggcgggggtgaggggggtggattgatccctaggcctctggaggatgatgtgcacaggtgctgatggtgggcagagtgggtctcccttcatgccccctccacccccctaatggtgtgtgtgggtcttggtagcagtaggtgggtaggttgttccctaggaaccctgatgatgtacattggtgacattgaggaatgtggattgatttttgtttctccggatgacatgtgtgggtgccagtagtggtgggtgggccactttaagttttttgttataatgtattttcattcttttttaaataaagcataacattaaatttacataagcatctgtttcctttctgttcttcagattgaatatttctattggtctatctatttccagatccacttacccctttttagtctcctttctgctttttaggccagcggtccccaacctttttggcatcaggtttcatggaagacaatttttctatggatccaggtagtggggcaggtgggatggttttggaatgattcaagcatgttacatttattgtgcactttatttctgttattattacattgtagtatataattaaataaatatacaacttaccataatgtagaatcagtgggagacctgagcttgatttcctgcaactagatgatcccatctggaggtgatgggagacagtaacagatcatcagtcattagattctcataaggagcatgcaaccagtatcactcatatgcacagttcataatagggtttgtgctttgagaatctaatgctgccactgacctgacaggtggtggagctcaggtggtaatgtgagtaatggggagtggctgtaaatacaggtgaagtttcagttgctcacttgccgctcacctcctgctgtgcggcctggttcctaacaggccatggaccaataccagtccatggcctggggttagggactcctgctttaggccattcagtgctttttaaaatttggtcatgttactttgtagttctcaaattgccatttgtttcttttttaattttgttcctctgttgagattttctgtctttttacttctttcagagagttcatcctctcagagaacagtataatagccactttaaagctttttcctggctgggtgtggtggctcacacctgtaattccagcacttttggaggctgagtggctggatcacctgaagtcatgagttggagaccagcctggccaacatggtgaaacccagtctctactaaaaatacaaaaaattagctgggcatggtagtgggtgcctgtaatcccaactacttgggaggctgaggcaggagaagtgcttgaacctgggaggcggaggttgcagtgagccgagatcgcgccactgcactccaggctgggcaacaagagtaaaactccatctcaaataaataaataaatgaatgaataaatacgtaaataaataaatgaagtttttttctggtaatttcaacatctctgtcttcttctacttggctgctcttgatactcatcttttgtgagttgttgagatttcctaggctttttatatgccaagcagtttttggattatatcctggacattttgaatattaagttgcaggtctctgggtcttggttagattgcaggtttggtattactttgagttcaccaatgtcattcttagcatatactcttcagggtcctaagatagcttctccatgaagtctgtctagaattcttagttgcactcagtgggagaagcagagaagattattcttattccattttatttcaagtagaattcttgctcattttttaaatctgagtttttattttatatgtgtgtgtatatatatatatatatatgtatatatatatatatatatatatatatatatatatatatttatttatttatttatgatacatggttttgctgtgtcaccgaggcctgactgcagtggtacgattatagctcactgcagcctcaaactcctaggctcaagtgatcctcctgcctcagccttctgagtagctgggactacagacatgtgccacgacctttattgtagacatagggtctcactgtatttatcagactggtctcaaacttctgacgtcaagtgatcttcctgcctcagcctcccaaagtgttgggattacaggcataagccactgtacctggctcaagtctgagtttttagtctttgttattgatgtgtagaaattctttgtataataaggatatgagtctgttgtcagtatgtgtattgcaaatactttcaatctgtagctgttttatttcttaattgtatgtcttttgatgagcagaaatatttgattttgatgaatgtagtttatcagtcttttcctttattcttagtggtttcttctttttttttttagacagagtctcgctcttttgcccagactggagtgcagtggcatgatctcggctcactgcaacctctgcctcctgggttccagcgattctcatgcctcagcctccccagtagctgggactacaggcatgcaccaccacgcccagctaatttttgtatttttagtagagacagggtttcatcgtgttgcccaggctggtctcgaactcctggcctctagcgatccatccaccttggcctcccaaagtgctgggattacagatgtgagccactgcacctggtctctttattcttagtgtttcttttctttctttcttttttttttttgagacagagtttcactcttgttgcccaggctggagtgtaatggcgcgatctcggctcaccccagcctccacctcctgggttcaagtgattcttctgcctcagcctcccgagtagctgggattataggcatgtgccaccacgcctggctaattttgtatttttagtagagacggggtttctccatgttggtcaggctggtctcaaactcatgacctgaggtgatctgccagcctcagcctctccaagtgctgggattacaggtgtgagccactgtattcttagtggtttcttaatgctgtatttcttactggagatttagtcatatgcttttttgctattgttgtgacaaaatacatacaacacaaaatttaccatgttagccgttttatggcattcaatttagtggcatttagttcactcacagtgttgtgcaaccactttctctgtctagtttcagaactttttcattaccccaaatggaaactctttaaccattaagcattcacttcttaatttatctctctattctgccaacttcccagcccctggaaattactactttgttttctgttgcctggattttcctgttctagatatttcacaaaaacagaatcactcaatatatgatcttttgtgtctatggcttctttcacttagcacaaatgctttcaaagttcatccatgttatagtatgtggtagtagtttagttctttttatggtctaataatattccattgtatggatatatcacatttgtttatctgttcatctgtttgtattgttttcacctttttttctgttattgaataatgcttctatgaactacaagcatctgttcgaaaacctgttttccattcttttgttttatacttagggtgagaattgctgtgtcatgtggtaattttatgtttaagttatcgaggaactgcaatactgtttttttttttcttacggtacctgtaccatttacattcccactagcaatgtatgaaggttccatgttcttcatatactcagcaacacttaattttttttctctcttgctcttttacttcgttttccttctcctctcttccttcattcttcatcctagtgggtacgaaatggtatgtcactgtggttttgacttgcatttttttgtgtttccatataaattttaggggtatttttccttcttctgggaagaatgttattgatatttttatagggattttggtgaatctatagatttcttcatttggtgtggacattttaacaacattgattcttttttcatttttctttttttgttcttgaaggagataaacaatattgattcaaaccatgaccgtggagttatctttccattattttgacattctccagtttctttcatcaatgttttatggttttcattgtggagatctttcacttctttggtttggatttgcatttcctaatgactaatgacactgagtgtcttctaatgtgctttttgtcatttgtgtagttttttggagaaatatctattcacattctttgcccattaaaaactatttttgtctttatcttactgaattgtaagagtttttttttttaaattttgaatactatacctttttttcttttaagagatggggtcttactatgttgcccaggctgacctgaaactcttggcctcaagcaatcctcctgccttggccttccagagtgctgggattacaggtgtgagccattgtggttgacctggatactatacttttatcagttatattatttgcaaatatttcctcccatttggtgggttggttgccttttcactattccagtaatgaataaaagtttcaaattttgctgatgtccactttatcatttttctcttgttacttgtggttttttggtcatatctgtgaagtcattgccaaatacaagtcatgaaaatgtactgctgtgtttttttttctaagagtttcataattttagctcttgtataatgtttaggtcttctctccatttgaattcatttttgaatatgatgtgaagcaagtgtgcaagttcctgcttttgcatgtggcggttcagttgttctagaactatttgttgaaagtttatttttctctcatgaatggttttggcatccttgctgaaaatcaattattggtcctagatatatgggtttatttctagactttcaattctgtcccataaatctgtatgtttacccgttgccaacattattttgattactctagcttcatagtaaattttgaaactgaaatgtgagtcctctaattttgctctccttcttcaagattgttttggttcttctgagcctctagcaattaatcatcagatcagtttgtccatttctgcaaaacaggctgttggaattttggtagggagtgaatggaatctggaggtcattttggggagtaatgcccaactgctaaccaaaatagttgatatagttaataaagtctttcagtccttgattaggggatgtcttttcatttatttagggtttctttaatttcttacagcatgttttgatattttcagcagaaaagtcttacattgccttgactaaatttattattgagtattttattctttttgatatgctattgtaagtggaattttttttcttaatttctctttcagatttctcattgctattaaatagaaatacaactgattttggcctttcgatcttatatcctgcaagttttctgaattagtcgagcaaccttaacattttctttttggtggattcttccctcttttggttattgcgaatcgtggactacaaacatgattgtacaaatatctcttttatgaagacagtcttgtaaatttactacaaatgtctgttctgtgatgtggaagtaaaaccaaaacttaatacagatgtaatcattgtatatctttgtgaggtagctactgttactatatcccttttcagataaagaaactaaggcatagagaatataaatgacttatttgcctaggctaacactgtgtattaaataaattaatttgaaccttttattctagtcatatttaatctaaactctgtcaataaggtgtccggctctttcctaaaattttccacatggcagttcctaggtaactaattttaatatctttcaattgttataagtacagttactttagaatcataggccctatttaaccttctatgtaataatttttattcctttaagtacattccagattttaatagctgtttaagctttggaatctcaaagtgttgattttttgattaaagttaccttggtactttaaaatgtcttcctagtattttttggtggacttacatttatgcattagtaaaagagccagatattccatagattgcacttattatttttctctgtgaactatgtatttgatcgtttataacaaatttccaaataaaaaagaacagtttaaatgcctcttgtcatattgatatgtttattattaaaatttcattttttttttcctagtgggaaagaagcctaaggaataaagtcatctctctagaccataaaaataaaaaacatatccgagggtgtcctgttacttccaagtcatcaccagaaaggtaagatatgtgtgtgtgcgacatagtatgggcttaacctataaagttgaccataaatgattcatttaagcttgttggttctcaattatgaccacatgtttaaaatagaaggtttgaattcagtggactctaagattctttcagtctctaactttctgtgattttaagtatcttaactcccttgtttttgtgcatttggaacatcttgataagctttcgctgataatgcaagagttatacatagactgataatgatgattgaatcattgtttgcgatcagcagtgagaaagggtgttccatttctgctgcttcttcttttttattttttaaaggctagtcaaatgaagcagtgggagtggggcagaaacagacatctgcaacttgtaatcaactggttgtaaacacctctgtacttgggccagccaaaaatgctctgtttagcaactatggtcctatagtcatagtgttaaattatttgtataggggaattaaatatctggaggattcaaattacagttgttactggaaataatttagagcatttcagaattggacataaatcaattattagaaagttattttaaaaagagtattgaattttctttttaacatagtgaatgaaaaaatgacaatagcaaattataattattggaaagtcacacaaatttagaagactcattggggtccttgaatttatgtcaaagtacttctataaactacttagtctaattctcccttttcaggtaaattgtgtgtaggaaatataaacatatattggtgactccatagcagtttatgagccttttgacattattaccataccatggataaattgtcaaggtgaataaggcaggtctattgatgcaatgatgatgctttcatccttagaacaagcacacactcagttttcagacttggtttcccaaaaagatttacataaataattatacttggtttgagagatggaatgctagaagtaaaggaatggtaatttttaattaataaaaaccaagccacattttcggaaaggtttgcacatacaaagttgttttatcttatgggagacatatcctgaagactttgcatgcttcacaacatacatcattcccctttagctgccgtcttgcatctccgcatgtgtgcgcctaatctcagctggtccacccaggaccctcttagcaccaaccctagttctctgcatggccccttatctgctctgataggatgaaagaaacaatcatgaatcaggaaaaacttgccaaactgcaggcacaagtgtgcattggtgggaaaggaactgctcgtagaaggaagaaggtggttcatagaacagccacagcagatgataaaaaacttcagttctccttaaagaagttaggggtaaacaatatctttggtattgaagaggtgcatatgtttacaaaccaaggaacagtgatccactttaacaaccctaaagttcaggcatctctggcagcaaacactttcaccattacaggccatgccgagacaaagcagctgacagaaatgctacccaacatcttaaaccagcttggtgtagacagtctgaacagtttaagcagactggctgaagctttgcccaaacaatccatggatggaaaagcaccacttgctactggggaggatgatgatgatgaagttcctgatcttgtggagaattttgatgaggcttccaagaatgaggcaaactgaattgagtcaacttctgaagataaaacttgaagaagttactgggagctgctattttatattatgactactttttaagaatttttgtttatggatctgataaaatctagatctctaatatttttaagcccaagccctttggacactgcagctcttttcaggttttgcttatacacaattcattctttgcagctaataaagccgaagaagcctgagaataaactttgaaacaaaggttaataaagttctttgcctagtaaaacaaaacaaaacaaaacaaaacaaaacaaaacaaaacaaaaagcttatatcattaaggccaggcgcagtggctcacacctgtagtcccagcactttgggagaccaaggcaggtggatcacttgagtgcaggagttcaagtacggcttaggcaacatggcgaaacaccatctctacaaaaaactaataaaagtaaaatttaaaaaatacttatattatttaaatctcacttttccataagaatgcttgtaaagtggtgggcacaggttctttgggataacaatcaataattttgttacatattattattttaattttgttttttagttttctggcattatctctaatatttttttcagtttattttctgctaaattatcagcctagcataaaaagataattgtttggccttccttatagaatttacgacatctgacttctgttccagagttagtgattttcaggcatggtcacagcattaacattataacatctatttaatatacacttaatgatattgttaggggataaaaagattttaaaattcaatagcagtagaaattgaattaaaaatacaataatgacccaaatcaccatcttcttaataaagaacaatgtggttgacgtgatcctgacaaaggaaaatgatgtattttttaaactgataaaagtgatgtagccaacaggcaatagtgtaattaattagttttatagtttactcagccaatttttgaataatagaatgtgatttttgacagatttttaaaatctagagggctttgtatcatttcaaaattttgtaccaaagacacatatatatgtcttttatatatataactaattatctgtattaatacataattagttcaaattcacaatgttaaaatgttcataaaatatttccggggaatgtgtatgaatattaaaaagtggaatttaaaaaagtatctctgttgtatggtagaaaggacctgagtcatttccaaatcctagttgtcttaagctaggagcaggcatcttgtctatactttagtttttctctactgaaagttctggagcttttgattcttaacctttttctgaatgttctacttctaaaaggtaggtgaaatgggatggttaggatatctagaatatctggaaactaaggtgggatagaacatgatgagttatttagatgaaactggattatgacagttaagttagcaggcagaattaggaagtgacttggttcaaaacaacaggaatgagaaattatgatgtatttgcttcacagcacaagaattttgtaaaattctcttgggcagattatttttagaagagaaccagtttggtttttctcttttaatgggattctttattcctcgcttgatctcattttcactatcaatgagcttacataatttgtatctacagatttagttctcttgtagcgtatttttttttaaatcaaattatgctgttcttcctactccactaattatttggcatatcagtcataagagtacatgagcaatatcagtttggaactgaaaaccctctatttataattacggcagctaatatctattaaatacttattatatgttaggcattaggctaagcctaaactgtcttatttaattttcataagtctgtgagatgtaagtagcattggccttatctcatagttgaggaaatttaggccttcttactataatggagaggaatgttgttaatgcatctctaggaaacctagttcagtattaacagacttaaatttttgttttaataacattgaattctcctgggctatctgaaacattttataaatcgctgctgtgctaagggaaatcaaacaacaaaaatacacctggggagggggaaagtttccatatgtttgtattactttggaactgctgactctatctcctgtgtttgatcttactttaaagattgtaatactttttagtgcttttttaaaaattaagttttattgtgatataatttacatatcataaaattcacccattttaattcaataattaaataatttttagtatatttacagaattgtgagccatcactacagtctggtgatggttttagaacatcccatcatgctccaaaagaaactactcatttacaaccactttccattctcacctacagctgtaagcaaccactaacctactttctgtctctataagatttgattttttggacatttcatatagacagaatcatacaatatgtttgatctttttcatctggctttcactgagcataatgtttttgaggtttattaatattgtagcatatatcagtatttcatttctttttataccacattgtgtttattcaccagttggatttttatgttgtttccacttcttagctattatgaataatattgtcataaacattcctatacaagtgtttgcaagtgtttgtgtagacatatgttttcttttttctttttctttttttcttttgagatggagtctcactttgttgcccaggctggagtgtagtggtggaaaacagctcactgcagcctccatctcccaggctcaagcgatcctcccgcctcagcccaccaagtagttgggactacaggcacgcaccaccatgcttggccaattattctgttttttgtatatttgaggttttgttatgttgcccaggctggtcttgaactcctgagctcaagtgatctacccaccttggcctcccaaattgctgggattacaggcgtgagccactgtgcccattcttagacatacatatgttttcatttatcttgaatagataactaggattagaattgctgtgtcatgcattaatattgtttaactttctgagcaactgctgaactttttttcaaaatgactgtacgattttgcattcccaccagcaatgtatgaaggattcatgtttttctacatcctcaccagtgcttatctccttccgttcttctttcctctctctttcttttctttccttccatctttccatcctagtgagtgtgaagtggtatctcattgtggttttgtttgccatttcctaataactaaatgatgttgattatcttttcatgtgctaattggtcatttgttttttttttttaattttttaaattatactttaagttttagggtacatgtgcacaacgtgcaggttagttacatatgtatacatgtgccatgttggtgtgctgcacccattaactcatcatttaacattaggtatatctcctaatgctattcctcccccctgcccccaccccacaacaggccccggtgtgtgatgttccccttcctgtgtccatgtgttctcattgttcaattcccacctatgagtgagaacatgcggtgtttagttttttgtccttgcgatagtttactgagaatgatggtttccagcttcatccatgtccctacaaaggacatgaactcatcattttttatggctgcatagtattccatggtgtatatgtgccacattttcttcatccagtctaccattgttggacatttgggttggttccaagtctttgctattgtgaatagtgctgcaataaacataggtgtgcacgtgtctttattgcagcatgatttataatcctttgggtatatacccagtagtgggatggctgggtcaaatggtatttcttgttctagatccctgaggaatcgccacactgacttccacaatggttgaactagtttacagtcccaccaacagtgtaaaagtattccagtttctccacattctctccagcacctgttgtttcctgactttttaatgattgccattctaactggtgtgagatggtatctcattgaggttttgatttgcatttctctgatggccattgatgatgagcattttttcatgtgtcttttggctgcataaatgtcttcttttgagaagtgtctgttcatatccttcacccactttttgatggggttgtttgtttttttcttgtaaatttgtttgagtttattgtagattctggatattagccctctgtcagatgagtaggttgcaaaaattttctcccattctgtaggttgcctgttcactctgatggtagtttcttttgctgtaaagaagctctttagtttaagtagatcccatttgtcaattttggcttttgttgccattgcttttggtgttttcgacatgaagtccttgcccatgcctatgtcctgaatgatattgcctaggttttcttctagggtttttatggttttaggtctaacatgtaagtctttaatccatcttgaattaatttttgtgtaaggtgtaaggaagggatccagtttcagctttctacatatggctagccagttttcccagcaccatttattaaatagggaatgctttccccatttcttgtttttgttaggtttgtcaaagatgagatggttgtagttatgcggcattatttgtgagggctctgttctgttccgttggtctatatctctgttttggtaccagtaccatgctgttttggttactgtagccttgtagtatagtttgaagtcaggtagcatgatgcctccagctttgttcttttggcttaggattgtcttggcaatgtgggctcttttttggttccatatgaactttaaagtagttttttccaattctgtaaagaaagtcattggtagcttgatggggatgccattgaatctataaattaccttgggcagtatggccattttcatgatattgattcttcctacccatgagcatggaatgttcttccatttgtttgtgtcctcttttatttcattgagcagtggtttgtagttctccttgaagaggtccttcacatcccttgtaagttggattcctaggtattttattctctttgaagcaattgtgaatgggagttcactcatgatttggctctctgtttgtctgttattggtgtataagaatgcttgtgatttttgcacattgatttttgtatcctgagactttgctgaagttgcctatcagcttaaggagattttgggctgagacaatggggttttctagatatacaatcatgtcatctgcaaacagggacaatttgacttcctcatttcctaattgaataccctttatttccttctcttgcctgattgccctggccagaacttccaacacaatgttgaataggagtggtgagagagggcatccctgtcttgtgccagttttcaaagggaatgcttccagtttttgcccattcagtatgatattggctgtgagtttgtcatagatagctcttattattttgagatacgtcccatcaatacctaatttattgagagtttttggcatgaaggtttttaattttgtcaaaggccttttctgcatctgttgagataatcatatggtttttgtcattggttctgtttatatgctggattacgtttattgattttcgtatgttgaatcagccttgcatctcagggatgaagcccacttgatcatggtggataagcttcttgatgtgctgctggattcggtttgccagtgttctattgaggatttttgcattgctgttcatcagggctattggtctaaaattctctttttttgttgtctctgccaggctttggtatcaggatgatgctggcctcataaaatgagttagggaggattccctctttttctgttgattggaatagtttcagaaggaatggtaccagcttctctttgtacctctggtagaattcggctgtgaatccatctggtcctggacttttttgggttggtaagctactaattattgcctcaatttcagaacctgttattggtctattcagagattcaacttcttcctgatttagtcttgggagggtgtatgtgttgaggaatttatccatttcttctagattttctagtttattcgcgtagaggtgtttatagtattctctgatggtagtttgtatttctgtgggaccggtggtgatatcccctttatgattttttattgtgtctatttgatttttctctcttttcttctttattagtcttgctagtggtctatcaattttgttgatcttttcaaaaaaccagctcctggattcatttattttttttgaagggttttttgggtctctatttccttcagttctgccctgatcttagttatttcttgccttctgctagcttttgaatatgtttgctcttgcttctctagttcttttaattgtgatgtcagggtgtcaatattagatctttcctgctttctcttgtgagcatttagtgctataaatttccctctacacactgctttgaatgtgtcccagagattctggtgtgttgtgtctttgtcctcgttggtttcaaagaacatctttatttctgccttcattttgttatgtacccagtagtcattcaggactaggttgttcagtttccatgtagttgagtggttttgagtgagtttcttaatcgtgagttcttgtttaattgcactgtggtctgagagacagtttgttataatttctgttcttttacatttgctgaggagtgctttacttccaactatgtgatcaattttggaataagtgcggtgtggtgctgagaagaatgtatattctgttgattgggggtggagagttctgtagatgtctattaggtctgcttggtgcagagctgagttcaattcctggatatccttgttaactttctgtcttgttgatctgtctaatgttgacagtggggtgttaaagtctcccattattattgtgtgggagtcttaactctctttctaggtctctaaggacttgctttatgaatctgggtcctcctgtgttgggtgcatatatatttaggatagttagctcttcttgttgaattgatccctttaccattatgcaatggccttctttgtctcttttgatctttgttggtttaaagtctgttttatccgagactaggattgcaacccctgccttttttgttttccatttgcttggtagatcttcctccatccctttattttgagcctatgtgtgtctctgcacgtgaaatgggtttcctgaatatagcacactgatgggtcttgactctttatccaatttgccagtgtattttaattggagcatttagcccatttacatttaaggttaatattgttatgtgtgaatttgatcctgtcattatgatgttagctggttattttgctcattagttgcagtttcttcctagcctcgatggtctttataatttggcatgtttttgcagtggctggtaccagttgttcctttccatgtttagtgcttccatcaggagctgttgtagggcaggcctggtggtgacaaaatctctcagcatttgcttgtctgtaaaggattttatttctccttcacttatgaagcttagtttggctggatatgaaattctgggttgtaaattcttttctttgagaatgttgaatattggcccccactctcttctggcctgtagagtttctgccaagagatcagctgttagtctgatgggcttccctttgtgggtaacccgaccttcctctctggctgcccttaacattttttctttcatttcaactttggtgaatcttacaattatgtcttggagttgctcttctcgaggagtatctttgtggcgttctctgtatttcctgaatttgaatgttggcctgccttgctagattggggaagttctcctggataatatcctgcagagtgttttccaacttggttccattctctccgtcactttcaggtacaccaatcagacgtagatttggtcttttcacatagtcccatatttcttggaggctttattcgtttcttcttattcttttttctctaaacttctctcttcatttcattcatttcatgttccatcactgataccctttcttccagttgatcgaatctggtactgaggcttgtgcatttgccgcgtacttctcgtgccttggttttcagctccatcacgtcttttaaggacttctctgcattggttattctagttagccattcgtctaattttttttcaaggtttttaacttcttttccatgggttcgaacttcctcctttagctcggagtagtttgatcttctgaagccttcttctctcaactcgtcaaagtcattctctgtccagctttgttccgttgctggtgagaagctgcgttcctttggaggaggagaggtgctctgatttttagagtttccagtttttctgctctgttttttccccatctttgtggttttttctacctttggtctttgatgatggtgacgtacagatggggttttggtgtggatgtcctttctgtttgttagttttccttctaacagtcaggaccctcagctgcaggtctgctgagtagcctaactgggaggcaccccacaataggggcagactgacacctcacacagccgcttactctctgagacaaaacttccagaggaatgatcaggcagcaacatctgctgttcaccagtatccgctgttctgcagcctctgctgctgatactcagggaaacagggtctggagctaattcgtcgtttgtatgtcattttgagaattgtctactcagatcctttgcccattttaaaattggattatctttttgttgtaagagttaaaaaatattttcttggtacaagtcccttatcaggtatatgattttcatatattttatctcattcttttggcaagtttctcactctcttgatggtgtcctttgaaacataaaagtttttaaattttgatgaagtcccatttatctgtttttctttagtctctgtgcttttggtgtcatatctaagaaaccactgcctaatccaaggtcatgatccattactactgtgttttcttctaagagttttatagttttagctcttagatttaggtctttgttccattttaagttaatttttgggtatggaatgaaataggtaccctaattaatatttttgcctttggatattcatttgtgccagcaccatttgttgaaaagacaaatggtgcgtcttcattattttccattgtattgtcttggaatctttgtgagatatcaattgatagtaaatgttagggtttatttctgcattctcaattctattctgttgatctgtatgtctgtccatatgctggtactgctatgtgctattgcaactttgtagtaagttttgaaattgggaagtgtgggtcttacaactttgctatttttttttcaagattttttggagctgttctgggtttcttgcattttcagttgaattttagaatcagcttatcattttaaccaaaaaaccagcaaggattttgacagagattgtattgaatctgtagactaaattggggaatattgccattttaacaatactgtgttcagattaataaacatgggatgtctttccatttatgtcctttacaatttttttcaatagtgttttgtggttttcagtgtgtctttgacttttttttgttaagtttattcctaaatactttcttatttctgaagctattatgaatggaattgttttctatttttagatttgtatttatttattttttttgagacaggatcttgttctgttgcgtggactggagtacagtgccatggtcataactcactgtggtcttgacctcctgggcttaagtgatcctcattcctcagcctccaagtctctgggaccaccggtgcatgccaccacgcttggccaattttttgaatttgtagagacggggtctcattgtgttgcccaggttggtcttgaacacctggtctcaagcaatcctccttccttggcttcccagagtgttagtattataggtgtgagccattgggcctggaattgttctcttcattcatttactcttggatttccaactttttagcatatagttgttgatattaatagtagtgtctaatgatcctttgtatttgtatggtatcaatttttatgtctcactttttgttttcgatcttacttgggtctttttttcttggttggtctagctagtggtatatcagttttatttttgcacaatgtcaactttatgtttgattttttttaagtcttcattttgtttatttctactctgatctttaccatttctttcctcctactaattctcgttatgtttgttcttgcttttctagtccattgaggttcattgtaaccactttttatttgaaataaccactttttatataagcatttattgctgtgcatttctctctcaacactgcttttgattgtccatagttttggtatgttgtgtttctgttttcatttgtttcaggaagtaaaaaaaatttttttcttttaatttcttcagacctagtggctgttcaggagcatgttgtttaatttccaggggtttgtacagtttccggtgttccacttgttacttgatttatggttgtattccaatgtggtctcaggagatactttatatgatttcagtttttaaaaaattattgagatttgttttgtgtcctttcataggatctgccctggagaatgtttcttgcactggtgaaaaaaatgtgtattctgcagctattggatgaaatgttttgtaaatgtctgttaggtctattaggtctatagtgcagattaaacctgatgttttctgtctggatgatctgtttagtgttcaaagagagtgtattagtccattctcacattgctataaagaactacctgagactgggtaatttataaagaaaggaggtttaattggcttatggttctgcaggctgtccaggcttctgtttctggggaagcctcaggaaacttacaatcatggcagaaggtgaggaggaagctagtgcattgtacatggctggagcaggagaaagagagaacgaagggagaggcactacacttttataaataaccagatttcgttagaactcactcactattaggagaacatcaagggagacattctcccccacgaaccaatcacctcccataaggcccctcttccaacattggggattacaatatgacatgagatttgggtggggacacagacccaaaccatataagaggatgttgaagttccaaactattattgtattgaggtctgttttctttttaactctaataatatgtactttatatttctgtgtgctttgatgttggctgtatgtattcagaatctttattttcttgctgaatttatgcttgtatcagtatgtgatgacctttttgtttctttgtaagttttttgactgaatgtctattttgtctgacataagtgtgtatagctactaatgcatatgttttgttttcatttgtgtgatatatatattttttatcccttcactttcagtttatgtgtgtctttatctaggaagagtatagtttggtcttgtttttttaaatccacttagcctgttaacatttttaaattggagaatttaaaccatttacatgtaaggttgttattggtagtgtaaagacatttgtcattttgttagctctctgattgttttgtatatcctttgttcctttctttctctttattgtttactcttatgtcttggtggctttctatagtgataatgactgattcctctctctcatttgtgtctgctcttccagttagttttatacttttgtgtgttttcatgatggtagatactttttgcttctagatgtatgactcccttaagcatttttcacagcatcagtcaagcagttataaattgcctgtttttgtttgtctgagaaagactttatttattcttcatttctgaagtatagttttgctgaatatgtcattcttggctggtagctctttatttcagcgctttgaagatatcatcccattctctcctggcctagaaagtttttgttgagaaatttagttagtctgatggagattcccttatatgtgacttgatgctcttctcttgctatttttagatttctgtctctgcctttgatttttgacagtttgagcataatgtctgggagaagtttagtgtcttggattgaatctatttggtaaaatttgagtttactgtatcttaatgtgtatgtctctcataagagttgggaaattttagctattattatttttatttatttattcatttattattattattatactttaagttttagggtacatgtgcacaatgtgcaggttagttacatatgtatacgtgtgccatgctggtgcgctgcacccactaactcgtcatctagcattaggtatatctcccaatgctatctttcccccctccccccaccccacaacagtccccagagtgtgatgttccccttcctgtgtccatgtgttctcattgttcaattcccacctatgagtgagagtatacggtgtttggttttttgttcttgcgatagtttactgagaatgatgatttccaatttcatccatgtccctacaaaggacatgaacgcatcattttttatggctgcatagtattccatggtgtatatgtgccacattttcttcatccagtctatcattgttggacatttgggttggttccaagtctttgctattgtgaataatgccgcaataaacatacgtgtgcatgtgtctttatatcagcttgatttatagtcctttgggtatatacccagtaatgggatggctgggtcaaatggtatttctagttctagatccctgagaaatcgccacactgacttccacagtggttgaactagtttacaatcccaccagcagtgtcaaagtgttcctatttctccacatcctctccagcacctgttgtttcctgactttttaatgatcgccattctaactggtgtgagatggtatctcactgtggttttgatttgcatttctctgatggccagtgatgatgagcattttttcatgtgttttttggctgcataaatgtcttcttttgagaagtctctgttcatgtccttcacccactttttgatggggttgtttgtttttttcttgtaaatttgtttgagttcattgtagattctggatattagccctttgtcagatgagtaggttgcaaaaattttctcccattttgtaggttgcctgttcactctgatggtagtttcttttgctgtgcagaagctttttagtcaaattgctcctgtttgcagacgacatgattgtatatctagaaaaccccatcgtctcagcccaaaatctccttaagctgataagcaacttcagcaaagtctcaggatacaaagtcaatgtacaaaaatcacaatgtacaaaaatcaacagacaaacagagagccaaatcatgagtgaactcgcattcacaattgcttcaaagagaataaaatacctaggaatccaacttacaagtgatgtgaaggacctcttcaaggagaactacaaaccactgctcaatgaaataaaagaggatacaaacaaatggaagaacattccatgctcatgggtaggaagaatcaatatcgtgaaaatgaccataccgcccaaggtaatttatagattcaatggcatccccatcaagctaccaatgcctttcttcacagaattggaaaaaactactttaaagttcatatggaaccaaaaaagagcccgcatcgccaaatcaatcctaagccaaaagaacaaagctggaggcatcacactacctgacttcaaactatactacaaggctacagtaaccaaaacagcatggtactggtaccaaaacagagatatagatcaatggaacagaacagagccctcggaaataacgccgcatatctacaactatctgatctttgacaaacctaacaaaaacaagcaatggggaaaggattccctatttaataaatggtgctgggaaaactggctagccatatgtagaaagctgaaactggatcccttccttacaccttatacaaaaatcaattcaagatggattaaagacttaaacgtttgacctaaaaccataaaaaccctagaagaaaacctcggcattaccattcaggacataggcatgggcagggacttcgtgtctaaaacaccaaaagcaatggcaaccaaagctattattttgttaaataggttttctttcgctttgcccatctcttctcctctgaaacaactgaaatctcaatatttgttctttttataatgtagcatgtgtcctgttggctttattaattcttttttttttgtctgactggttcatttcaaaagaaatgtcttcaagttcagaatttttttcttctgcttagtctattgttgaagttcttaattgtgttttttatttcattaattgaactcttctattgcaggatttttgtttggttctttttaatgatacctatctctgtgttgatttctcacttatatcctgaatttcttttctgatttttttttgtattgtttttctgtgttctcttgtaactttttgagtttccttagattgggatccccaacccctggagccatggactggtactggtccgtggcctgttaggaaccaggccgcagagccagggggtgggtggcaggtgagtgaatattactgccttagctctgcctcctgtcagatatgtgggagcattagattctcacaggagcatgaaccctattgtgaactgtgcatgcaggcgacctaggttgcatgttcctagtgagaatctcatgcctgatgatatgagatggaacagtttcgtcctaaaacagtccatactcccctgccatcccgtggtctgtggaaaaattgtcttccctgaaactggtgcctggtgccaagaagttggggatcgctgccttagataattattttgagtttgttttcaggcatttcatacatatatttttctctgtgttacgttactggagaattattgtatttttttggaggtgtcatgctttcttgctttgtcatgtttcttatgttcttatgttgatatccatgcatctggtgtgacagttgtttctttcagttttatggattaacctcatttggtagagactttttcctgtagatgtatctgtgatgtttgttagggttgtattctgagtggatgcagtggtatagtctccatgttatttctttggtcataatcagtgatattggtgtctgcaaggtccttattgtcttatgctgcaatttatttatttatttttaaaattttcagactcgtcagcaggaagtgaatctgtggtttctaacggagactgtggcaaggctttactggggacaggtacaatagtctttggacccctgggtggcatgtatgagcaccagtcatggtagggatgagccatttgtgccagttcttgggattcctggtggtaacatgggttagggtggtggttagggtccaggcaggtcagttcttgggtccctggtcagcatgtttggtgccagctgtggccgaggtaggtgacaggaaacaatgggtgggttctcaggccacttgggcattggcaatgtacttgggcattggcagtgtacttgggcattggcaatggtgagtagggtgggctagtgcttaggccccttgacagtgtgtatgggctgtggtggtggcagtggacagggcagccctgtctttaggcacagtattgtgcgggcaggtcctggtggcagcagattgggtgggcctgttctttcttcctgggacagtgcctgcggatactgtttgcaggggcagggtgcacctgtccttgggtccccaggtggtgtgcatgggtgttggctgtagccatccatagtggtgggtggtggcagctgtttttcaagttattggtgctgttgggcactggcagcaatgagtgggcctggccagtactcatgcttctggacagcatgggcatgggcttgtcctcaggccctgtactgtacatgtaaacactggtggcagcaaatgaagtgttactatttggttctgggatgacatgcttgtgtgctgtttggagtaggcaggtctcacttgtctttaggcacctggatggcgggtgtgggtgctgatggtggtggtgagctgggcaggcctccatagatgtactttatcatgttggagaatttcctttctattcttaatttggtagcggctttcaaaataatgtatgcatgtttgaatttcctgcattctcatatggtaatttatattctttattttactcatcaaatttattggataaattcattttcatatattaaagtaactgcattcctgggataaatctccttgatctgatttataatattcttaatacgttgctggattcagttttcttgaggatgtttatgtttgtatacgagagggagattcatatatggttttttttcttgtgctgtctttttctggttttggtattaggctaatactgtcattatagaatgagttggaaaactttctctccttcattgttttctggaagagtttttggggaaattgatactcattctttttttttttttttttaatttatttttttattgataattcttgggtgtttctcacagagggggatttggcagggtcatgggacaatagtggagggaaggtcagcagataaacaagtgaacaaaggtctctggttttcctaggcagaggaccctgcggccttccgcagtgtttgtgtccctgattacttgagattagggattggtgatgactcttaacgagcatgctgccttcaagcatctgtttaacaaagcacatcttgcaccgcccttaatccattnnnnnnnnnnnnnnnnnnnnnnnnnnnnnnnnnnnnnnnnnnnnnnnnnnnnnnnnnnnnnnnnnnnnnnnnnnnnnnnnnnnnnnnnnnnnnnnnnnnnnnnnnnnnnnnnnnnnnnnnnnnnnnnnnnnnnnnnnnnnnnnnnnnnnnnnnnnnnnnnnnnnnnnnnnnnnnnnnnnnnnnnnnnnnnnnnnnnnnnnnnnnnnnnnnnnnnnnnnnnnnnnnnnnnnnnnnnnnnnnnnnnnnnnnnnnnnnnnnnnnnnnnnnnnnnnnnnnnnnnnnnnnnnnnnnnnnnnnnnnnnnnnnnnnnnnnnnnnnnnnnnnnnnnnnnnnnnnnnnnnnnnnnnnnnnnnnnnnnnnnnnnnnnnnnnnnnnnnnnnnnnnnnnnnnnnnnnnnnnnnnnnnnnnnnnnnnnnnnnnnnnnnnnnnnnnnnnnnnnnnnnnnnnnnnnnnnnnnnnnnnnnnnnnnnnnnnnnnnnnnnnnnnnnnnnnnnnnnnnnnnnnnnnnnnnnnnnnnnnnnnnnnnnnnnnnnnnnnnnnnnnnnnnnnnnnnnnnnnnnnnnnnnnnnnnnnnnnnnnnnnnnnnnnnnnnnnnnnnnnnnnnnnnnnnnnnnnnnnnnnnnnnnnnnnnnnnnnnnnnnnnnnnnnnnnnnnnnnnnnnnnnnnnnnnnnnnnnnnnnnnnnnnnnnnnnnnnnnnnnnnnnnnnnnnnnnnnnnnnnnnnnnnnnnnnnnnnnnnnnnnnnnnnnnnnnnnnnnnnnnnnnnnnnnnnnnnnnnnnnnnnnnnnnnnnnnnnnnnnnnnnnnnnnnnnnnnnnnnnnnnnnnnnnnnnnnnnnnnnnnnnnnnnnnnnnnnnnnnnnnnnnnnnnnnnnnnnnnnnnnnnnnnnnnnnnnnnnnnnnnnnnnnnnnnnnnnnnnnnnnnnnnnnnnnnnnnnnnnnnnnnnnnnnnnnnnnnnnnnnnnnnnnnnnnnnnnnnnnnnnnnnnnnnnnnnnnnnnnnnnnnnnnnnnnnnnnnnnnnnnnnnnnnnnnnnnnnnnnnnnnnnnnnnnnnnnnnnnnnnnnnnnnnnnnnnnnnnnnnnnnnnnnnnnnnnnnnnnnnnnnnnnnnnnnnnnnnnnnnnnnnnnnnnnnnnnnnnnnnnnnnnnnnnnnnnnnnnnnnnnnnnnnnnnnnnnnnnnnnnnnnnnnnnnnnnnnnnnnnnnnnnnnnnnnnnnnnnnnnnnnnnnnnnnnnnnnnnnnnnnnnnnnnnnnnnnnnnnnnnnnnnnnnnnnnnnnnnnnnnnnnnnnnnnnnnnnnnnnnnnnnnnnnnnnnnnnnnnnnnnnnnnnnnnnnnnnnnnnnnnnnnnnnnnnnnnnnnnnnnnnnnnnnnnnnnnnnnnnnnnnnnnnnnnnnnnnnnnnnnnnnnnnnnnnnnnnnnnnnnnnnnnnnnnnnnnnnnnnnnnnnnnnnnnnnnnnnnnnnnnnnnnnnnnnnnnnnnnnnnnnnnnnnnnnnnnnnnnnnnnnnnnnnnnnnnnnnnnnnnnnnnnnnnnnnnnnnnnnnnnnnnnnnnnnnnnnnnnnnnnnnnnnnnnnnnnnnnnnnnnnnnnnnnnnnnnnnnnnnnnnnnnnnnnnnnnnnnnnnnnnnnnnnnnnnnnnnnnnnnnnnnnnnnnnnnnnnnnnnnnnnnnnnnnnnnnnnnnnnnnnnnnnnnnnnnnnnnnnnnnnnnnnnnnnnnnnnnnnnnnnnnnnnnnnnnnnnnnnnnnnnnnnnnnnnnnnnnnnnnnnnnnnnnnnnnnnnnnnnnnnnnnnnnnnnnnnnnnnnnnnnnnnnnnnnnnnnnnnnnnnnnnnnnnnnnnnnnnnnnnnnnnnnnnnnnnnnnnnnnnnnnnnnnnnnnnnnnnnnnnnnnnnnnnnnnnnnnnnnnnnnnnnnnnnnnnnnnnnnnntggcggccgggcggagacgctcctcactttccagactgggcagccaggcagaggggctcctcacatcccagacgatgggcagccaggcagagacactcctcacttcccagacggggtggcaccgggcagaggctgcaatctcggcactttgggaggccaaggcaggcggctgctccttgccctcgggccccgcggggcccgtccgctcctccagccgctgcctcccgggcggcgctcgccggcgcggcggcaaagaccgatactcattcttttttaaatgttcagttgaattcatcagtgaagccatctggtcacgcccttataggacaattcaagttttctatttactcattcgttgaaaccgactttattgatgtgtaatttacatagaataacatgtatctattttaaatataaatttgtatgcttttggacaagtgtactaaatgaattttaagactctaaagtttttttattgtagtaaaatacacttaacataaattttatcatcttaatcatttttaattgtacagtttaatgttgttaaataaattgataatgtgcagccaacaccatcatcaatctccataatactttccatcttgtaaaactgaaacccattaaaaaaataaattcccatttctccctccaccccattccccttatgaccaccagtttgctgtttgttttgatgattttaactttttaaagtacctcatacagtatttgtctttttgtgactagctaatttcacttagcttaatgtcctcaaggttcattcatgttgtagaatatgccagattttcttccttttgaaaggtgaataattttccattgtatttacatgccacattttgtttctatatttattcatctgtgggcacttggtttactttaatattttagctatcgttaacatgggtgtacaaatacctcagctcactgtttttaatttttttgggtgtatatccagaagtggaattgcttggtcttatagtaatgatatttttaatttcttgaacaactgctgtattattttctgcaatggccgtacctcattttatgttcctgctagcagtgagtaaatttccagtttcttcacatccacatcaacacttgttactttctgtttttttttttttaaatttgtagtagccatcctaatggtatgaggtggcatttcattgtagtcttaattgcattttcctatttataaatgatactaagcatctttttatgtatttattagagattcatatatcttctttggagaaacggctacacaagccctatgcttatttttaaattggcttttttggttttttattgttgagttttaggatattttttctttttttgagactgggtcttgctgtgttgcccaggctggagtgcagtggtgtgatcacatagctcactgtagcctcatcctcctgggctcaagccctcccacctcagcctcccaagtagctaggactacaggcacatgccaccatgcctagctattttattttttattcttttttagaaatttaaaatcatttaaaaatttttttgtgggtacatattaggtgtatatatttatgggctacatgagatgttttgatatataggcatgcaatgtgaaataagcacgtcatggagaatggggtatccatcccctcaagcatttatcctttgagttatgaacaatccagttacatttgttaaggtatttaaaaatatatgattaagtaatattgactatattactctattgtactatcaatagtaggttttattcattctatttttattatagccattaactgtccccacctgcccccctcagcccactagttctcttcccagcctttggtaaccatccttctactctctaggtccatgaattcaattgttttgatttttagatcccacaaataagtgagaacatgtgatgtttgtctttctgtgcctggcttgtttcacttaacgtaatgatctctaatcccatctgtgttgttgcacatgattgaatctcattttcttttatggctgaatatactccattgtatatatgtactacattttatttatccattcatctattaatgggcacttagatcacttccaaatctactgatttcctttttctggtgtataccagcagtggaatggctggatcatacggtagttcaattttcagttttttaaggaacctccaacgtgttttccatagtggttatattaatttacattcccacctaaagtgtgtaagtgttcccttttctccacatccttgccagcatttgttattgcctgttttttggctataagccattttaactggggtgagatgatatctcattgtagttttgatttgcatttctctgatgatcaatgatgttgaacaccttttcatatgcctgtttgccatttgtatgtctttttttttggaaaaatatctattcaaatcttttgcctatttttttgctcacattattagattgtttcctgtagggttgtttggactctttgtatattctggttattgatcccttgtcagatgggtagtttgcaaatattttctcacattctgtgggttgtctcttcactttgttgattgtatcctttcatgtacagaagctttttaacttgatgtgatcttatttgtccatttttgctttggttgtctgtgcttgtggggtattgctgaagaaatattagcccagaccaatgtcctggagattttccccagtgttttcttgtagtagtttcatagtttggggttttagatttcagtctttaatccattttgatttgatttatgtatatgatgagagataggggtctagtttattgttttgcctatcaatattcagttttcccaggatcacttaatgaagaggtgtctttccatcagtgtatgttcttggcacctgtgtcaaaaatgagttcactgtaggtgtatgggtttgtttctgggttctctattttgttccattgatctatgtgtttgtttttatgccatttccatgctgttttggttagtatagctctgtagtataatatgaagtcaggtaatgtgattcttccagttttgttctttttgctcaagatagctttgcctattctgggtcttttgtggttccatataaattttaggattagtttttctatttctgtgaagaatgtcactggtgttttgatggggattgcattgaatctgtagattgctttgggtggtatggagattttaacaatattgattctttcaatctatgaacatggagtaattttctattttttagtgttctcatatttcttaataattgttttatagtttttattgtagagatctttcccttctttggttaattcctaggtaattttatatgtggctattattgtaaatgagattactttttaattttttttcgtgttttttgctgttggcatacagaaatgctgctgacttttgtatgttgattttgtgtcctgcaactttactgaatttgtttatcagttctaatagttttttcatggagtctgtaggtttttccaaacattggatcatgtcatcagcaaacgagtaatttgacttcttcctttgcaatttggatgccctttatatctttctgttatctgattgctctagctaggacttccaatactatgttaaataacagtggtgacagtagacatccttgttgtgttctagatcttaagggaaaggctttcagtgtttccctatttagtatgatactagctaggatactaactatgatagctagtgggtctgtcatatatggcttttattatgtgaggcatgttccttttattctcagttttttttttattatgaagaactgttgaattttatcaaatggtttttcagcatgaacagaaatgaccatatgatttttatccttcattctgttgatatgatgaatcatgttgattgatttttgtaagttgaaccatctttgcatcatagggataaatcccacatggttatgatgaatgagctgtctaatgtattgttgaatttggtttgctagtattttgttgaggatttttgcatcagtgttcatcagagatgctggcctgtagttttctttttttgatgtttctttgtttggttttggtgttagggtaatactggacttgtagaatgagtttggaagtattccctcctcctctctttttcagaatagtttgagtaggattggcatttgttcttatttaaatgtttggtagaatttagcagtgaacccattgggtcccgggctttcctttactgggagacttttaattacagctttgatctcattgcttgctattggtctgttcagattttggatttcttcgtggttcaatcttgttagattgtatgtattcagaaatttgtccatttcttctagattttccaatttattggcatataattgctcattgtagccactaatgatcctctgaatttctgtagtatcagttgtaatgcctcctttttaatttctgattttgtttgtattttctctttttgtttttctttaggttggctaaaggttggtcaattttgttttaacttttgaaaaaaccaactttttgtttcattaatcttttgtatttttaaaatttcaatttcatttgtttttttctctctttattttttctcttctaattttgggtttggtttgctcttgctattttagttttttaagatgcatcattagatagtttatttgaagtttttttcttttttttgatgtatgcatttaaaactataaactttcctctgaatattactttttctgtatcctataggttttgctgtattgtgtttccaatatcatttgtttcaagaaatttttcagttttctttcttaatgtcttcattggcccattggccattcaggaacatattgttttatttccatatatttgtatagtatctaaaattcctcttgttattgatttctaattttcctttgtggtcagagaagatgcttcatattatttcagttttttggaaagttttaagactcgtttattgacctaacatatggtctgtccttaagaatggtctatgtgctgaggaaaagaatgtattctgcagctgttggatgaaatggcctataaatgtgtattagatccatttggtctatagtgtggattaagtctgatgtttgtttgtttgtttgtttgtttgttgattttctgtctggaagatctgtccagtgctgaaagtggggtgctgaagtctccagctattattttattgaggtctatctctcactttagctctaatattatttccttggtatatctgggtgctccagggttgggtgactatatattttaaattgttatatcctcttgctgaattgacctctttatcattatatagtgacccatttgtctcttcttatcattttagtcttgagatctgttttgtctcatagaagtatagtgactcctgttcttttttggttttcattggaatggagtacatttttctatccctttatttttagtttatgtgtgtctttataggtgaagtgtgtttcttttaggcaacagatcaatgggtttttcatccattcagccagtctgtgtttttaagttggagaatttagtccatttatattcaatgttattattgataagtaagaacttatttcctgccattttgttaattgttttctgattgttttgtggtcttctctttcttgtttttttttttccttttttttttccttcctgtcttcctctagtgaaggtgatttttaatatgatttggtttaatgctttttattttttgtgtatccattgtatgttttttggtttgaggttaccatgaggcttgaaaatactatcttattaccctttatgttaacccgataacaacactatttgcataaacaacaagcaaaataaaaattaataaaaactctatgccttaactttgtctccctgctttttaacttttttgttgcttctatttatatctttattgtattgactgtcttgaaaagttattgtagttattatttttggttggtttatcctgtagtctttctacgtaggataagagtagtttacacaccacagttacagtgttatgatattctttctttttctatgtacttattaccagtgagttttgtagcttccagtgattattttccttggtgatgttgatgctagtagatgttcttcattgtctgggcattgaagagttaggtttttattgtagtcttctctatctgtgcttacttgtagccatcctttttgggaaggcttttcagatatttgaaaggagctgggtgttatgctctaagctttagggtgcaccccaactcagtaatgctgtgattcttacagactcatagagatactgtcttgatagtcttgtacaagaactgggagaattctctggattaccaggcagagactcttgttcttttcccttactttctaccaaacatacagtctctattccaagccacctaaagatgggggtggagtgactcaagcacccctgtggccaccagcattgtgactgtgctgggtcagacctgaagccagcacagcctgggtctctcccaagacctgctgtcactactccctggctactgcctatgtttgcttaagggtccagggctctatgatcagcaagtggcaaagccagccaggcctgtgttcttcccttcaggatggcaagatctcccaagcccttggtcagtccagaagtgctgtccgggagtcagggactggagtcaaaaaccttagaagtctacctagtgttctattgtattatggttgagctggcactcaaatgacaagatgcagtcctccccactcttccctcactttcccaaaagcagaagagcctcaccccatagccattgctatcccaggccacaaggagtatggccagactacctacaatttcccttaaggcccgaaatctcttaagatggcttgttgtgaatgctgcctggcctgggactcaacctttagggcagtgagctcccctctgctccaggtcaggtccaaaagtgccatcatagggtcacgtcctggaattagggaccccaagagcctctttggtgctctactccgctgtggccatgctggtaccaaaggtgcaagacaaaatccccttttaatttcaaagaataagataactccttttctttcaaaaactgcttctttagtatttggccagttgtcaagtaacaaatgcatgtgctggaaaggtagagtctaaggcagacctcagggatggatgatttttttttgagacgaagtctggctctgtccgccaggctggagtgcaatggcgcaatcttggtgcactgcaacctctgcctcccgggttcaagcgattctccttcctcagcctcccgagtagctaggactacagacccacgccaccacacccagctaatttttgtatttttagtcgagacagggtttcaccatgttggccaggatggtctcgatctcttgacctcaagtgatgtaggaagatctaccaggcaaatggaaagcaaaaaaaaaaaaaaaaaaaaaagcaggggttgcaatcataatctctgataaaacagactttaaaccaaccaagatcagaaaaaccaaagaagggcattacataatggtaaagggatcaatgcaacaagaagagctaactatcctaaatatatatgcacctactacaggaccacccagattcataaagcaagttcttagagacctacaaagagacttagactcccaaacaataatagtgggagactttaacaccctactgttaatattagacagatcaatgagacagaaggttaacaaggatatccaggacttgaactcagctctggaccaagcagacctaatagacatctaaagaactcttcaccccaaatcaacagaatatacattcttctcagcaccacattgcacctattccaaaattgaccacataattggaagtaaaacactcctcagcaaatgtaaaagaacagaaatcacaacaaactgtctctcagaccacagttcaatcaaattagaactcaggattaagaaacccgctcatactgcacaactacatggaaactgagcaacctgctcctgaatgactgctgggtaaataacgaaatgaaggcagaaataaagatgttctttaaaaccaatgagaacaaaggcacaacataccagaatctctgggacacatttaaagcagtgtgtagagggaaatttatagcactaaatgtcaagagaaagcaggaaagatctaaaatcgacaccctaacatcaaaattaaaagaactacagaaggaagagcaaacaaattcaaaagctagaagaaggcgagaaatagatcagagcagaactgaaggagatggagacacaaaaaacccttcaaaaaatcagtgaatccaggagctggtttttttgaaaagatcaacaaaatagataaaccaatagccagactaataaagaagaaaagagcaaagaatcaaataaatgcaataaaaaatgataaaggggatatcaccaccgatcccacagaaatacaaactaccatcagagaatactataaacacttctatgcaaataaactagaaaatctagaagaaatggataaattcctggacaaatataccctcctaagattaaaccaggaagaaattgaatctctgaatagaccaataacaggctctgaaattgaggcaataactaatagcctgccaaccaaaaaaagtctagaaccagatggattcacagctgaattctatcagaaatacaaagaagagctggtaccattccttctgaaactattccaatcgatagaaaaagaggaaaatctccctaactcattttatgaggccagcatcatcctgataccaaaacctggcagagacacaacaaaaaaagaaaattttaggccaatatctctgatgaacatcgatatgaaaatcctcaataaaatatgggcaaaccgaatccagcagcacatcaaaaaacttatccaccatgatcaagtatgcttcatcactgggatgcaaagctggttcaacatacacaaatcaataaacgtaatccatcacataaacagaaccaacgacaaaaaccacatgattatctcaatagatgcagaaaaggcctttgacaaaattcagcccttcatgctaaaaactctcagtaaactaggtatcgatggaacatatctcaaaataataagagctatttatgacaaacccacagccaatatcatactgaatgggcaaaaactggaagcattccatttgacaactggcgcaagacaaggatgccctctcttactactcctattcaacgtagtattggaagttctggccagggcaatcaggcaagagaaagaaataaagggtgttcagataggaagggaggaagtcaaattgtctctgtttacagatggcatgattgtatatttaggaaaccccatcgtctcagcccaaaatctccttaagctgagaagcaacttcagcaaagtctcgggatacaaaatcaatgtgcaaaaatcacaagcattcctatacaccaataacagataaacagccaaatcatgagtgaattcccattcacaattgctacaaagagaataaaatacctaggaatccaacttacaagggatgtgaaggacctcttcacggagaactacaaaccactactccaggaaataaaagaggacacaaacaaatggaaaaacattccatgctcatggataggaagaatcagtattgtgaaagtggccataatgcccaaagtaatttatagattcaatgctatccctatcaagctaccaatgactttcttcacagaattggaaaaagaactactttaaatttcgtatggaaccaaaaaagagcccgcgtagccaagacaatcctaagccaaaagaacaaagctggaggcatcatgctacctgacttcaaactatactacaaggctacagtaaccaaaacagcatggtactggtaccaaaacagatagatagaccaatggaacagaacagaggcctcagaaatcacaccacacatctacaaccatcagatctttgacaaacctgacaaaaacaagcaatggggaaaggattccctatttaataaatggtgttgtgtaaactggctagccatatgcaggaaactgaaatgactccttccttagaccttatacaaaaattaactcaagatggattaaagacttaactgtaagacctaaaaccataaaaaccctagaagaaaacctaggcaatatcattcaggacataggcatgggcaaagatttcatgactaaaacaccaaaagcaatggcaacaaaagccaaaattgacaaatgggatctaattaaagagcttctgcacagcaaaagaaactatcagctgagtgaacaggcaacctatggaatgggagaaaatttttgcaatctgtccatctgacaaagggctaatatccagaatctacaaagaatttaaacaaatttacaagaagaaaaagagaacctcatcaaaaagtaggtgaagggtatgaacagacacttctcaaaagaagacatttacgcagccaacaaacttctgaaaaaaattctcatcatcactggtcattagagaaatgcaaattaaaaccataatgagataccatctcacgccagttagaatggtgatcattaaaaagtcaggaaacagcagatgctggagaggatatggagaaataggaacacttttacattgttggtgggagtgtaaattagttcaaccattgtggaagactgtgtggtgactcctcaaggatgtaaaactagaaataccatttgacctagcaatcccattactgggtatatacccaaaggattatagatcattctactgtaaagacacatgcacatgtatgtttattgcagcactattcataataataaagtcttggaaccaacccgaatgcccatcaatgatagactggataaagaaaacatggcacatatacaccatggaatactatgcagccataaaaaaggatgatttcatgtcctttgccaggacatggatgaaactggaaaccatcattctcacaaaagaaacacaagaagagaaaacaaaacactgcatgttctcactcataagtgggagttgaacaatgagaacacatggacacagggcagggaacatcacacaccagggcctgttggggagtggggggctgggggagggatagcgttaggagaaatacctaatgtaaatgatgagtggatgagtgcagcaaagcaccatggcacatgtatacctatgtaacagacctgcatgttgtgcacatgtaccccagaacttaaagtataataataataaataaaaaatttatttgatattcttttcttcaaaagaaaaaaaagaaaaagaaaaaggaaattctgtgctgatgcattgtacctgaatgaaagcagaggtgcattttgccaggtcccacagaaatttaattttgcatgtattgaggtaatcatgtggtttttgactttagctctgtttatgtgataaatcaaatttttttttttttttttttggagacagtgtcttgctctgtcacccaacctggagttcagtggtgctatctgggctcactgcaaccgccacctcccgggtttaagcaattctcgtgctttagcttcccgagtagctgagactaaaggtgtgcaccaccactcccgggtagttttttgtattttcagtaaagacagggttttgccatgttgcccaggctggtctcaaactcctgagctcaggcaatcctcttgcctcggtctccccaagtgctaggactacaggagtgagccactgcacctggcctcaaatttctgatttgcatatgttgaacccccgtttcatcccaggtgtaaagcctgcttgatcgtgatgaataagctttttggtatgctggtggatttgatttgcctgtattttgttgaggacttttgcattgatgttcataaaggatattggccttaaatttttcattttgtctctgccaagtttttgtatcaggatgatgctggcctcatagaatgagttggggatgttagctagttattatgcagacttgtttctgtagttgctttatggtgtcactggtctgtgtacttcagtgtgtttctgtagtggctggtaacattgtttcctttccatatttagtgcttctttcaggagctcttccaaggcaggtcgtgtggtaatcaatttcctcagcatttgcttgtctgaaaagaatcttcttaggctgggtgccatggctcatgcctgtaatcccagcactttgggaggctgaggtgggaggatcacttgaggtctggcgttcaagatcaggctggccaacatgatgaaacccccgtccctactgaaaataaaaaaaattagctgggcatggtggtgggtgcctgtaatcccagctactcgggaggctgaggcaggacaatcacttgagcctgggaggcagaggttgcagtgagtcaagatggtgccactgaactccatcctgggcagcagagcgagactctatctaaaaaaaaaaaaaaatcttatttctccttcacttatgaagcttagtttggctgcatatcacattttgggttataatttattttctttaagaacattgaatactgttcctcaatctgttctggcttttatggtttctgctgagatgtctgctgttagtctgatgggcttccctttgtaggtgacctgacctttttagctgcctgtaacattttttctttgattttgaccttggagaatctgatgattatgtgtctttgggatgatcttgtgaaatatcttactcgggttctctgctaggcctctctagctaggctggggaagttctcatgggtgacagaactcatgaatgataggttggggaatgttggcctctctgactaggttggggaagttctcatggatgatattcagaaatatgttttccatgttggttaccatctctccatctctttcaggtacactagtgagttgtaggtttagtctctttacataatcccttatttctcagaggttttgtttgtttcttttcattcttttttctctatttttgtctgactgtcttatttcagaaagtcagtcttcaggcactgagattctttgctccacttggtctattctgctattaatacttgcgattgcattatgaaattcttgtatatttttcagctatatcatgttagttggtttctttgtgtactggctattttgtctgttagctcctgcatttttttattgtgattcttagcttccttggattggttttcaacatactcttgcatctcaatgattttcattcctactcatattctgaattctatttctgtcatttcagccatctcagcctagttcagaacccttgctggagagatggttcggttctttggaagaaagaaggcactcgggctttttgagttttcagtgttcttttgctggttctttctcatctttgtgggcttaagttccttcagtctttgaagttgctaacctttgggtagagtctttttcttttatcttgatgactttgagggtttgattgtggtaaaaagtggagtcagccaactggctttgtttctggaagattttagggtaccagtgctcagctcccaacttctcctggactgtgtgctctaactctgtgggacttgtatcagaccccaactttgttctctgttacctcaaggttaggaatccactgtgttggggggctgaggtgctcctggactgctggtcactactctccaatgggtggtgtcagctaaagcatttcatagtgcagtagtgcagtggcagctggatgtatcctcatttgcatgtgccagcagcagtggtagtgtattagtgtgttcttaggctgttgataaaggcatacccctgactgggtaatttataaagaaaaagaggtttaatagactcacagttccatgtgactatggggggactcacaattatggcagaaggtgaaaggaacatcttacatggcggtggacaagagggaatgaaaaccaagtgaaaggggtttccctttataaaaccattagatctcatgaggcgtattcacttccatgagaacagtatggggaaactgacactatgattcagtgaactcccactaggtccctcccacaacacgtgggaagatgagatttgggtgggaacacagccaaactgtatcacgcagtgtggcctagtgcatgtctgttggctgtggcaaggtgctaatgggtgccagggtgcctgtcttcatatgagtgttcaccacagtggcagcggcaatgtggctgatggggagcaggagtccctgctggtgactgtgtgtgtggttgtgctgttggtgatgttggcacgggtgtggtggtactggtgggtacaggtctttgtgctttctctgtgcgctgtaggcaggggtggttgctcagtgtggggggaaggtgtgctgttctttgtgtctggcttcacttcctgtcagtgttggtgcaagggtgaggtacttccaggggcaaggctggctggctttgtgctcgccatggtttgcactgcaatggtggtcagttgtgggagcggggtggactgcactcacacagtggcagggcagggtgcatgcacagtcacatgctgctggggcaaagaaagcaaaaccctcctgcacacatatacatcagcaaagcaacgtgcggggatggggggtgggttgccatgggccaaggggaagctgcggtgtgtggagggagtggcaggcttgtgcatggttttgggggccaccccactggagctctctgcctgttaggcaggtcccccagtgatacaggaccccagggcacccaatgctgccctgcaagtagacaccaccaggctgcggccctgggagtggccacagaccaaggatggtcaggtcagactggccttgtttgataggcaagacaaccctgcagagttcaggtccaacagttcccctagggctaaagtctcttatgggagcaagtcaagcctagagggatggccctcactggccatgctctgctgcagactctcccgcaccaaaccttctgggctccacatcagctggtgtgctgcccctaccacttctctaagcagctctccctgccaactgaagtgtccgtggtggttgaggggtctcctcctgctgggattccagagacccttcgggagagtggattgccccttgccagttcaactcacccattgccccccagagtcactgggggctatgaatgagtcctggtacatggtaagcctgtgcaaggttcccaccttcctccctcttcagcctagcttctgtgtcttccctccatccagtctctgtgccttccctctgaagatctattaggagtgcacccatcgtcttggtcccttggtggtagccattccacttggctgtgtctagtcagccactgtgttgggagcctgttttcatttcttttgggtaaatacctaggagttggattgctgggtcatatggtaggtgcatttttaactttgtaagaaactgccaagctgccataagtgattgtgccgtattatattcccaccactagccatgtagaagggtttcattttctccacacccctgccaacacttacatggtcatcttctttattatcaccctttctaatggaggtgtagcagtatctctttgtggttttaattgcatttccttgatgactgatgatgttgaacattttttcatgtgctttattgaactttaagaaatcttctctaggatatctgttgaatttcttttgttccttcctcttttttaaaactttttttaaagaccagaaaaataagattaatgatattgaatgtctttttgtatgcatgttggccatttgtgcatttttttggtgaagtgtccaaatgttttgtccatttttttttgaaggacaagaaatactctaaataaaattatgacaaaaggcatgaaaacaatgccttcatcccaattgttagtttattttccggaatcaaaatgtaggactccaagtctgagggagaattcttttttctgatttctgaatttatttggccaagctatataattaagtcatgtttatgtattcattgataaactacttttgttgaaaaatttttaaaaaattgaggttttctggaaaaccagtgtatttttttttattcataggcaaacatgttattttttttctgctgtgattatgctgggtcttcctacaattataaaatttctcatatgtaaaatagaaaagatacagtatatttcttattttttaggaatgcgattttttaaagaatctgagtatatggatcaatgatcatttcccctcataaaaaattaagtgagtattagtataatggtttggagctttcaaaggaacactttataaatagacagttggatggttctaaaaagcctaggcaagtaacaggaaccagcctacctaagtatatagattgttgggttaggtggagttctctgtttagctgccttttacttttcatttttgctgtgaaatataatgtaattaacaaaaaatgactaaaaggtaaacagttcaatgaattattcattaaatttaatctatttttaataaggtagattttaaccaccactgaggtacaaaacagaaaactgccccagaagttctcaacccctgcaaatgataaccctttaaagcagcagtccccaacctttttggcaccagggactggtttcatggaagccaatttttccacggatggggttgagagtggggtgggttggtgttgtggggagtggtttaggcatgaaactgttccacctcagatcatcaggcattagattctcataaggagtgcacaagttagatccctcgcatgtgaagttcacaatagggttcgtgctcctatgcgaatctaatgctgctgctgatctgacaggaggcagagctcaggcggtaatgctcgctcacccaccgttcacctcctgctgtgtggcccagttcctaacagaccacagactggtacaaggcagtctgggggctggggacccctgctttaacgataaccactcacctaactttcaaagtaattactttcttagttttgttggatagtattgttacctaagtatatatccctaaatactaaatttaggttttattttgcctggtttgaatgttgttctttactcttaagtttctcttctggtatacagagaaatcttatgacacttaaatgttgtagatgtttagaattttttcaccttactagtttggggggaaaaagattactgacttctgttgccggatatttttagtcagacaaattataataaagtcaaatgtgaaataagtattttcccggagaagccaaattgtccgtctcatttagagcctcactattagaataatcagtaaaattaccaatgatttgttattttccaatataaattcttatttggtctgagtgaatagaaaaatggctttttccaacattgaatagtctcatatttgaaattattaaaattaccattgagataataatttcctcaataatttagcaaatacctaagtcatatagtttttccattagacttaattacattttatccttaaaataaatttccttaaagttttgtttgcatttttatttggtcatttagaattttaaattgtacagttgtaaaatgtataaataatagactggtagtctttaaacattttggcacatttgccgtctctcggtgtctctttatgcatgtatatagatgggcatcacatatatacatatatacatgcacatatacatacattttttggggaaccatttgagagtaagttgcaggcatcatggtattttatcttcagatacttcagcttgcttttcctaagaacaataacattctcttacataacaattataatatactatcaagaaaattaacagtaatttcatatcatcatctgctataaagtccacaatcagaatttcccgagtattcccaaaatgtcttttatttatttatttttaaatctatttggccaaaactgcagttacttttgtacctacctaatagaatcaagttcaggttcatgcattgtatttggttattataccccattagtctcttaatctagaagagttcccacctgctctgccctttcccttttaaccatcacattgagttttgaggagtccagaccagttgttctgtagaatgcctcacagtctatatttttattattttattggtcttgcccatatgattaggtccaggttacatttttggcaggaatatttcatacctgatgtcatgtacttcttactgcacatatcagggggtaacataatttctggttgtttcactcttagtactcctatgtttgatcacttgcataagatggtgcctgccagatctgttcattgtaaagacaccttttcttctttgcaattaataatcatctgtgaactcaattatctgtttgcaggaaaaaaggatatttgtggcattataaatgtgttaatctcacagggatttcttaactgtaagacaacgtgtgtttctttagtaagcttgtgttccccctctctacaaggattatttgaaaacttttttcaaacctatgttcctttatctttcctatcactttttttttttgagacggagtctcgctctgtcgcccaggctggagtgcagtggcgcaatctcggcttactgcaagctccgcctcctgggttcacgccattctcttgcctcagcctcctgagtagctgggactacaggtgcccgccaccatgcccggctaattttttgtattttttagtagagacggggtttcaccatgttagccaggatggtctcgatctcctcacctcgtgatccacctgccttggcctcccaaagtgctgggattacaggcgtgagccacagcgcctggcctcctatcacttttaagagaaggtcttggttggaatgcctcttctcctgtcataaaccagtgtagtgtgaagcagttaagagtgctggcaagaaatttgagagtgtgtggttctgaatcgcattttcactactcactcgttttacttagatattaatcagcctatcttggtctcctcagctgcatgagaagaataatttgtaagcccctcatggagtggttgtgaggattaaatgaaataaatcattgtaaaatgcttagcacagtgcctggtatatagtacatgttcaataaatattagcacttaatgcaatttcttgggaaacttactgtgttaattatcctgccttctgtgtctttaacccttacgtgcttcccataagcatttaaacttacacaaatctttcctatctttaactaatcaaccagtaactgactaaaaaccctttcctgcttctcatgtctattttcaggtcttgtcttattttccactttcacaaccatatttctcaactactttcatttgctatatccctttgctcctttccctttgctgatcccactgtattctggtttctgctcccaccattcttctaaactacctctgataaagtcatcatctccgtaaattaatttttattcctcattattcctagcacttccattttattcttcataaacatcaaaatgatcttttaaaagtgtagctctgatctcagtgtttcctaattaagactagtggatttccattgttgttgacataaagtctcacatccttaatatggtttgctaagtcctgcctaactgcccattcttagacacattacctctttattctaagtacatgagtcaggtaagtcctttaatttctttgaagaagctttactcaaaacatttgcattttgtcctgttttttggacctttctccattttttacttgtttcctttggatagtgcctgtccttctttgagacttcagcttcaaggtcatattctcagaaacttggctcagaagaagtgcaacatctgtatttcttcttcatagcacatattagaattctaattaaataatgaattggtttattctctgtaatgtacaccccatgaaggcaaaaactcaactattttgtttgtagctgaaactccagattatactagcatcgttgttttgctggaagatgttcagtaagtgcttgtagaatgaattattattgatccatagagatgtcatttattttttaataattttaaaactaatagcttaatttttttttgtgtgtgtgcaacatgtttggagttttcagtgttctatggaagtaccctgggaacttgtaccctcttcccactagatggtttggggatatacactcaaatggctgctgcaaacaagtggttttttttttttgagagttcccgttttatcttgaaaatatgtgaacatattgctgtttcttaatattcttgtgtttgttaagcaaacaaacaaaaagtgcctaaaactgtttcataggtagtaaaatagacactcttctgattaaacatttcccagtactttcagccattcctcacttgacattgttttaaatgcacttggtagcctgttcacaccactgcagaaactatattccatagtttttggaattccagaactaaacatagttattcaaatattcagcataaagatgtattgaatgagaagatgggtaaaacatgatgggcaaaagtgttgctggaactgcttgcatttgtcagtctttttttttttttgaaattggtataggtacagtaaggtaaattttttaagttgacctattttagaaataaggtaaaattaaatctgtatcttaagactgtatagccttaagaatgtaagtgatgcagtagtggacccttagttttaataatgttttctgaatcaacaaatgctaaaacaaaaacacatttttagcacaaacagtggttacatctgtgatgagatctgcaaatgaacactgtccttcaactaacattgttaataaacatgaatgcattgccaggagtctagcagctgtacatgtgtaatgatagttgtagtaaacttgacagaattctgaagaaaatcccaacttaagtgaaatagattttactttttaaggtatctttgataatagttaggcattttttcttttttcttagggtatttactatagttgcttgaggaactgaagtttacagtttctggagatattagtttgtgatgaattcatgtattctacaatgtgtagtaccatatatactaattatttatgtgtataacaggcaactcaaagttatgttgacgaatgtcctatggacggatttaggacgaaaattcagaaagaccctacctagaaacgatgctaatttatgtgatgccaacaaggtgcaatcagactcattgccttcgacatctgttgacagcctagagacatgtcaaaaattagaacctcttcgccaaagccttaatttatctgaaaggtatgttgttcagtattgattttgttcaacttaccacatttgaaataatatgaatcccgtactcctaatgataaaattgttgaaatgacctgaaaggagatttgcatatataggcataccacactctaaagcaaatcttaaagctgcctatcttaatttacagagttagctgatgtttctgtacttcattaagcagattgacatggaattatatttaaaaacgagtatcattagtacatttaacttatttaaatttgatacatgtacacatctttttagggattattttatgattaaaatgaagatacatatatatacgtgtgtgtatatgtattatatgcatataaatgtgtgtgtatatatgtgcattaatattttcttcatctttaacattctttcaaaatgttatctaatctagatcctaaccacttttgacttttttgagcttgtattttaaatgaatttttaaaacaggagatgatgttaaaatattgcctctaggtttttaatagtaaatgttcagtttaattttgtagagtaacaagaccaatttctgttttgtgttttttgaaagaattatatgggagtttggggctgaaaactaggaattagctctaggaatctataacataatatcttttatacatcacgatttacaatttcagccattaaatgaatgttttggagggaaggtactttattttcagttagaataacttacaattagcgagacagtactttggttatatggtctgtaatctgaatgacagtatataagtactttaaaccaagacccagataaaaactgctaactttcaacacagttatttttaaaataaaagtagaattcttgtcaaaacatctgaagatattacacattaatttttaaagagaatacttcttttaaaaagacaaaatcataaaaagccaagtttaacgaagaaatttcttactagctcatacctgatataaatttaattttctaaaacactgtaaatcttaagagtcagacagcttagcatcagtaatttatgaagcagcttgctctcattctatgttctagcagatttcttccccagtacaggttaatctcttactgcactgacagatgtaaataaaagggctacttaaaggaatggctttctaatatctttgactcttttgaaaggaacctttaaactctcttcaaatgacaacaaactcatcaatcgcctcatcctacatctgtcctttttccaatcagaacagtgtggtagtccattctctcagaataatagttttaccactaggaatttttagcacatagattatgtgctcatgaaattcaaatataatatgaagtaaagagtcccagtaagattctaatttgttttttgctgtgttttaaaattgttgttgtctattgttcagttagtgggtgagctaccagctagtccagacctctttcctcagctccaggtgtcctaaactcaacttgttgtaaagtgagaacctcatcttttctcaaacttgtgcctgtttttgtattcccctctatctgagtgattgacactacttacaaattagaacttgggaattgtctttgactcctcttttttccttatccttatatccagtcatttaacatatatacatatatatatttttttggggggcggtagaaaattaaaccttatttaattttaaaaccaaaccactaggaaaatatatcatagcctggaaacagtaaatggacaggctatgttatcacttcaagtaataagttggtgaaaatacaatgaggttgctatcaaaacaataaggtgccatgctggggcaggaacactgtgttgcaaaagccccaggcaaaaatggtatttggtaatgggggctgcctctcctttgctttaaagaagtcagctcatcctagcccaagttgcttactttttcttccttgaatttcctgctgccaggggtttgtcttagttgtgctctgttaattcagggggctaagtatgtaatgctaggtttaggctttcattctatctgttctataaaaaccaggtttttccaaatccagtacttcataacttttataatcaagtagccaactgctcctcttttactgttcattcctagatactagtatatatcacaatcaaaacccctttctcttccaaggggaaagtgttactgcaagattgtcctgtcattttgctacacacagcctcagggtccatcaggcagtaattatgcttcccgtaattagtgtgtcctcgcctctcatgtttttgcatggtctccaggctgaaagatgcagcatgtaataattttaagaaatgtacatccacatcttgatgaccagaaatggggatcaaggaacctttcaaagttcttatctaaactagtctccctcccaattccacatcttaaaatcaacttgtatgcccttgtataaattacacaaaaccaagaaaacaaagacccagaaaacttttttttcccttctaagttagtgacctcatggattttgtttcacagcttatggaaaatggtgtggtgacacttctggtaaacaggatgttggcaacaaagagaaaatatctttcttcaaactccaccaactctaacctgccagcctattggtacctgtgtagtaagaagagtctggtgtgttggagggctctggcctgttacaggggagatccttactgccaggacaagcactggccacaggaaatataagatctaaaactctcctgtaaatctctgacccaatttaacaccacttttttccatttcatgttttaggactgaaacatgaaagaaccagtgtctagaggcaagtgacatatgcattacacttgtggccatccttaatttcttcattcataaactttgcttaaaatactaaagttcccaaatgccttataaaaaatatattcttgccctcagcccccatggccactggcaaagacttttatttcccaatggctaagagagcttccttcatcttcttggtcatagttgggatgaggtgcatgtggtcatccacacacttggtcacacaaccgtccagctgctgcttcacctgaagctccttactcccagcagctattgaatctttggctttgttgttgcattgcgtggtacactgggccaggtggtcctggaacttctccaactcactggtgaccaaagcctgggcttgagccagaagcacatggcagtgcttgatgcactggtgcacctgctgcagggaggcctggctgtcctcacagcagctggtgctgcaccggaacatgagaccctgcatcttccggatgttctctctctccagactcttcaccatcgattctaccactcgtcacctgcagctgctgtagctgttatggtgaccccacactgccccatgctgtgcggccatatatagttatttttaacccctaaatctgtcttttaaaggatctgttctccatctttattgccagtgcatcagttcaagccctaataacttcgtgcctttattactatggtagtaacttgattaggtttcctttacgtagtctttttcttcttgttttattctttatgttgttgtcaaaatatttattctaaaaggcagatcttacttgccacttactagtttaacatctttcaatggctccacataatcttctggataaagttcaaacttcttagtttggcacacaaggcccttaatgatctcgcctttgcttatctctagctttgtgtctgtctgttcctccatattcacaatgtacttcaggtttagggaactattttcagcttactgaatgtatatactgttgtatacatcctgtttgttttcttgtcttggaaactatcccccccctccctttttttttttaaggaagccttccttgattccaccctccaaatctatatatgatccctttctttttcttgctaaacagcttgttagtatatcataacgcttatcacactatgttgtgatttttagttctcttcctccctgtagcaaacttcctgaggataggaactatattttatttcttattttttctttattcctaatatagtactggacacttattaaatgctcaattaatgtttgctggataaaagaaagagattgcttctcaccagagttacatctctagactctttgtctaacatatattttccctgtaagaaccaattatatactcagtaattttggtgacaaccaggaaaagagatattacaagcgtcaaataaggaaactggagaactcttgtgtatggctttggatagatgttttctacctgatacttgctatatataataggagacttaggcttttttcagtctttgcttaactttgatatgaggctttttgttttattttcatttctactcaggacttaaaattttagaaagataagagggagaaacatttatttttgcattttaattttatcctaaagtttaatcattgagtaaactgaaattactcattcagttccagaaatggtattttgttggacattttatttgctttctggaatctaaagtagtgaactaagtatcttgccttttatgtgagggcagtttggctttttgatttcaggataaaattgagaagaaaaatagaaaagacagttcaaatcaatcttgtaagtaatggagaaaagggttttagcagtatcaaaagagttttagaaatatcaaactagcagtatgtggaatgcacatttattttttaaaaatatgtaaactgcattttagtgttagttttatctccatgtatggttcatatctattttcctgggagaaaattccagacatctataagtctttgtcaataggaaagaaagaacctagtgggacacttatacaaggcttttgagaaaataaactatctttcttctgctttcatcagtttgtaccagagatcgttagagaaatatggagatagtgtacccatattccattaagaagagttagctgctggtacttggaatttctgtaaatatatttatttatctttgtcttaaatttatatgtgtttaaaattaaaaagaattacgtattccagatatgtgatggtaaaactatttggatattgcagtgttcctgtcattttaagatttttaaagccagtaatctagttgagtgataattattcacttaaaatttagcttaataaaagaacaaatttagaaactaatctgtgaatctctttaataaagttactcaaagattaaattttttatacatacctttaagatgctgatttagaaggtatattttaaattatatcatctgggacaagcatagagttatgagaatcctcttaaaatgccacatagcacaattttagaaaggaattcattgcagcaaaatgaaaactaaattagtattgtaatttttggctcattatagatttattaatggatataattatgttatctttcagcaaagacttcatttctctaaaaatttgctctatatatgaagttgtatgttaatagctctttctagttcctcagagttttccctgcattattaagttatttgaatatgacagtttccttgctatttaaacaaggaaggaacctgtagtttgcaattgagaaaactaagagtcagagagaataatcatgcagagacacagtcagaaaatgatactacttctcaggccagtatactttctgctacctctcactgcatttcaaaatttgtttctgctttggtttagtgtatttatgatatttcgaagtgggatttcatagtattagtaaataaaattaaataaataataccttacgtactgatactgtttacatacttaggaaaaaattgggtaaatgtgtgaaatgacaactttagttcttccttccagattcagatagtatgaaagatgaagtatacacctttatatacttcaattccttgcagaaattcagaacttctgaaatgctggctagccctggaatgtccttgactgtgctaatttataaacctgtactgcaaaagacagctaggtattgttaatttagctctcagtttatagatttgtgttcttcaaggctatcacacaaagttccttgtttcctcagggtacccaaactggataagttttcaatagttgatgaaaggtgtttgggctgtggctgtgtgctatgaagagctatgtgtactgtagtcattgctaactgtttaattatatactttaattgtatattgaaaattgcaaacatctaataagattttttatcaagattgcagagcatagtaaattataagtattatttgaaagggtagtttatagctttgagcaagactacaataatatgaaaattattacagaaatatgaaaattaagtgatattccatttattgtgtatttactatgtgccaggaattatgctaactgctttccatctattatctcattgaatcttaacaactttgtaagggagatattattcttcccattttagagatgagaagatcaatgtgtagaggtagaaattatggtaattaacttgcccaaggatttatagttataaggtggtaaaataagaatccaaacctatgttggtctaacttcaaaagtccttgctgttaattcctgtgccatactgcttctctttgcattttcacccttctgaactttaatttttgtcatcagtaaagtaggaattggactttgctacagataccatatctaattcttttattttattttattttattttattttattttattttatttttgagacagaatctcactctgtcatccaggctagagtgcagtggcgcagtctctgctcactgcaacctccgccttccaggttcaagtgattcttgtgcctcagcctcccgagtagctgggatcgcaggtgtgtgccaccatgcccggctaatctttgtatttttagtagatggagttttgccatgttggctaagctggtctcgaactcctgacctcaggtgatccacccatcttggtgtcccaaagtgctgggattacaggcgtcagccactgtgcccggcctataccatggtttctttatccacttgttgatggatgggcatttgggttagttccacatttttgcagttgtgaattgtgctcctataaacacgtgtgcaagtagctttttcctatacttcctttcctctgggtagatatccaggagtgggattgctggatcaaatggtggttctacttttagttctttaaggaatctccgcactgttttccacagtggttgtcctagtttacattcccaccagcagtgtagaaaagttcccttttcatcacatccatgccaacatctactattttttgattatggccattctagcaggaataaggtggtaccgcactgtggttttgatttgcatttccctgatcatttgtgatgttgagcactttttcatatgttttttggccatttgtatatcttctttgagaattgtctattcatatccttaccccactttttgatgagattgtttgtttttttcttgttgatttgtttgcattcattatagattctggatattagtcctttgtcagatgtatacattgtgaagattttttcccactctgtgggttatccgtttactctgctgactgttccttttggtatgcaaaagctctttagttcagttaactccgagcaatttaactttgtttttattgcatttgttttgggttcttggtcataaaatccttgcctaagccaatgtctagaagggtttttccaatgtcatcttctaaaatttttatagattcaggtcttagatttaagtccttaatccatcttgagttgatttttgtacaaggtgagagatgaggctccagtttcattctcctacatgtggctagccaattatcccagcaccatttgttgaaaagagtgttctttcctcactttatgtttttgtttgctttgtcaaagatccacttggctgtaagtatttgggtttatttctgtgttctctattctcttcccttgatctaggtgtttatttttatatcagtaccatgctgttttggtgactttggccttatggtatgagatcaggtaatgtgatgcctgtagatttgttctctttgcttagtcttgctttgggtattcaggcacttttttgatttcatttgaattttataattgttttttctaattctgtgaagaatgatggcggtattttgataggaattgcattgaatttgtagattgcttgtagcaatatggtcattttcacaatattgattctacccatccatgagtatgggatgtgtttccagttgtttgtgttgtctgtgatttctttcagcagtgttttgtagttttccttgtagaagaggccttttgactctttggttagatatattcctaagtattttatttttattttttggcagctattgtaaaaggggttgagtttttgatttgattctctgcttggtcgctgttggtgtatagaagagctgctgatttatgtacattaatcttgtatccagaaactttaccgaattcttttatcagttctaggagttttctggaggagtccttagggttttcaaggtaaatgatcatagcgtcagcaaatagggacagcttgacatcctctttatcgatttggatgccctttattttttctcttgtgtgattgctctggccaggacttccagtactatgttgaagaggagtggtgagagtgggcatccttgtcttgttccagttctcagagggaatgctttcaacttttccccattcagtattatgttggctgtgggtttgtcatagatggcttttattatattgaggtatgtcccttgtatgccgattttgctgagagttttaatcataaagagatgccggattttgttgaatatttttctgcatcgattgaggtgatcatgggatttttgtttttaattctgtttatgtggtgtgtcacatttattgacttacgtatgttaaaccatccttgcattcctaatatgaaacctatgtgatcatggtggattatctttttgacatgttgttggattcagatagctcatattttgttaaggacttttgcatctgtgttcatcaggggtattggtctgtagttttctttttttaatgtcctttcttggttttggtattaaggtgatgctgtcttcatgggatggtttagggaaggttccctctttctctatcttgtcgaatagtgtcaataggattggtaccagtttttctttgaatgtccagtagaattctgctgtgaatccgtctggtcctgggcttttttttgttgttggtaatgtttaaattaccatttcaatctcactgcttgttattggtctgttcagggtacctaattcttcccgatttaagctaggagggttctatctttccaggaatttattcttctcttctaggttttctagtttatgagtataaaggtgtttatagtagccttgaatgatcttttgtatttctgtgttgtcagttgtaatatctcccgttttgtttcttattgagcttatttggattttctctcctcttttcttggttaatattgctaatggtctatcaattttatttctcttttcagaaaaccagctttttgtttcatttatcttttgtattttttttgttttaatttcatttagttctgctctgatcttgcttgtttcttttgttctgctgggtttgggtttgatttgttcttgtttctctagttttttgaggtgtgaccttagattgtctgtgctctttcagactttctgatgtaggcatttaaggctatgaactttcctcttagcatcgcctttgctgtgtcccagaggttttgataggttgtgtcactattgttgttcagttggaaaagttttttaatttccatcttgatttcatttttgacccagtgatcaccaggagcaggttatttaatttccatgtgtttgcatggttttgaaggttctttttagagttgatttccatgttttattccactgtggtctgagagagtgcttggtgtaatttcagttttctcaaatttattgaggcttgttttgtggcctatcatatggtctgtcttggagaaaggtccatgtgctgttgaatagaacatatattctgcggttgttggatggaatgttctgtatatatccattaagtccatttgttccagtgtatagtttaaatccactgtttctttgttgactttctgtcttgatggcctgtctagtgctgtgagtggaatattgaagtcccctactattactgtgttgctgtctatctcatttcgtaggtctattagtagttgttttataaatttgggagctccagtgttaggtgcatatatgtttatattttcctgttggactaatccttttgtccttatataatgcccctctttgtcttttctaactgctgtttctttaaagtttgttttgtctgatataagaatagctggtcctgtgagatttatgttttaaagaggttctgttttgatgtgtttctaggatttgttttaaggtttagagctccttttagcagttcttttagtgcttggtaatggcgaattctcttcccatttgtttgtctgaaaaagactgtatctttcctttgtatatgaagcttagtttcgctgcatacaaaattcttggctgataattgttttgtttgaggagggtgaagatagggctccagtcccttctagcttgtagggtttttgctgagaaatctgctgttaatctgatagtttttctttacaggttacctggtgcttttgcctcacagctcttaagattctttccttcatattaactttagataacctgatgacaatgtgactaggtgatgatctttttgtgatgaattttccaggtgttctttgagtttcttgtatttggatgtctaggtctctagcaaggccagggaagctttcctcaattattccccaaaatatatcttccaaacttttagatttctctttttcctcaggaacacctattattctttttttttttttatactttaagttttagggtacatgtgcacacgtgcaggtttgttacatatgtatacatgtgccatgttggtgtgctgcacccattaactcgtcatttacattagatatatctcctaatgctatccttcccccctccccccactccacaacaggccctggtgtgtgatgttccccttcctgtgtccaggtgttctcattgttcaattcccacctatgagtgagaacatgcggtgtttggttttttgtccttgcaatagtttgctgagaatgatggtttccagcttcatccgtgtgcctacaaaggacatgaactcatccttttttatggctgcatagtattccatggtgtatatgtgccacattttttaatccaatctatctttgatggacatttggcttggttccaagtctttgctattgtgaatagtgcaacaataaacatatgtgtgcatatgtctttatagtagcatgatttataattctttgggtatatacccagtaatgggattgctgggtcaaatagtatttctagttctagatccttgaggaatcaccacactctcttccacagtggttgaactagtttacagtcccaccaacagtgtaaaagaggaacacctattattcttagatttggtcatttaacataatcccagacttcttggaggctttgttcatattttcttattcttttttctttgtctttgttggattgggttaatttgaagaccttgttttcaagctctgaatttctttcttccacttgttcaattctattgctgagactttccagagcattttgcatttctataagtgtgtccaaagtttcctgaagttttgattgttttttatttatgctatctatttccttgaatatttctcccttcacctcttgtatcattttttggacttccttacactgggcttcacctttctttggtgcctccctgattagcttaataactaacctcctgaattctttttcaggtaaatcagggatttcttcttggtttgagtccattgctggtgagctagtatgatttttcagaggtgttaaccttattttgtcatattaccagagttggttttctggttccttgtcatttgagtaggctctgtcagagggaaggtctagggctgaaggctgttgttcagattcctttgtcccatggggtgttcccttattatagtactctcgcccttttcctatggatgtggcttcctgagagcggagctgtagtgattgttatctttcttttggatctagccacccagctattctaccaggctctgggctggtactggcggttgtctgcacagagtcttgtgacctgaaccatctatgggtctctcagccatggataccagcatagtatttggggtgtcctgggtcatgctggtgtactctgcttccttcaggaggtgtgtgggtcctcttaggcttcctgatttattcctgcagttgttctggagcaaaaattcacgatgcgagcttccacatgctgctctgtctgtcgagtcagagctgcaatctagtctgcctcccatccaccattatccccttttgttcccaattctggaggcaagaaatccaatcaaggtgttttgagggctgtgagagaacgcctgtgccaggcctctctctttggcttgtagatggctgtcttctccctgtgtctcttcacattgttttctcactgtgcgtctcattgtggttttgatttttatttctctaatgatcagtgatgttgtgcttttaaaatatgattattgtctgcatgtgtatcttctttagaaacgtgtctgttcatgtcctttgcccactttgtaatgggattgtttgctttttttcatgttaatttgtttaagttccttgtaaactctggaaattagacatttgttagatggatagattgcaaaaactttctcccattctatagggtgtctgttcactctaatgatagtttcttttgctgtgcagaagctccttagtttaattagatcccatttgtcaatttttgcttttgttgcaattgcttttggcatttttgtcatgaaatctttgcccgtgcctgcctacgtcctgcatggtattgcctaaattttcttctaggttttttatacttttaggttttacatttaagtctttaatccatcttgagataatttttatatatggtgtaaaaatcgggttcaatttcaattttttgcatatggctagttcttttcccagcatcatttattaaatatggagccctttgtccattgcttgtttttgtcaggtttgtcaaagatcacagaattgtaggtgtgtagtattacttctgggctctttattcttttccattagtctgtgtgtttatttttgtaccagtaccatgctgttttggttactatagccctataacatggtttgaagggatgtaaggtgattcttccagttttcttctttttgcttaggattgccttggttatatggggttctttttggttccatatgaattttaaagtagttttttctaattctatgaagaatgttgttggtagtatgataggaatagcattgaatctgtaaattgctttgggatatatggccattttaatattgatactttctatccatgagcctgggatgtttttccatttgtttgtgtcttctctgattttttaaagtaatgttttatagttctccttatagagatctttcacctccctggttagctgtattcagaggtatattattctttttgtggctgttatgaatgagattgcctttgtgatttggttctccacttggctgttgttggtatataggaatgctagtgatttttgtacattgattttttttatcctgaaaccttgttcaagttgttttatcagctgaaggagcttttgtgctgagactatcgggttttctagatagttgttgcagcactttttattctgattatggtataaatggatattttcaagagtttcctgaagtatctgttggcaatctcagttatctggaatcctttggcaaattagcattgaggatgtagtataatgtaataggacagacaaaaaacccccaaagataacaggcccaggttcttccactaggaaagctacttatacttgggcagcttatttaacttttctgagcgttgggttcttcatgtttacaataaagagaggactaatttattttaaagttctccaaggatctaaaattttatgctgtctggaacataatgaaatgaacatagtgtctttatgtagggaaaaatagtaaaatttttaattaggggatgtgcattgttttagtcatagtgccattgcacacttaatagactacagtatagtgtaaacataattatatattcactaggaagccacaaaatttgtgtgacgtgttttattgtgatactcactttatggcgggggtctggaactgaactggccctgtctccaagtatatgcgtatacttttgtttaagtgaaaatgtgaacttcactgtactttgttacctttgttgttttatgcagaggcatctagaatgatgaatcctttccggaagattttcagtttacttttcccagacccatcagaggaaatcactgtttgtggtagctatatgaaatgtatttcttaaattgtaagacttgaaacttgaaattacttcttgatccatgggctatagaatggatgttttattagcaggcatgaaaacaacacgaattctcttgtacctccccatcagagctcttgggtgactaggtgcattgtcaacgagctgtaatattttgaaaggaattttatttattttttttctgagtggcagttctcaaagatggtgttaagtgattcagtgatccacgctgtaaacagatgtgctgtcatccagtcatccagacattgtagttccatttttagagtacaggcaaagtagatttagcatttttttttttttttttttttgagacggagtcttgctctgtcgcccaggctgtaatgcagtggcatgatctcattgcaacctccgcctcccaggttcaagcgattctcctgcctcagcctctgaagtagctgggactacaggtgtgcaccaccatgcctggcaaattgttttttttagtagaggtggggtttcaccatgttggccaggctggtctcgaactcctgacctcaagttatccgccggcctctgccgcccaaagtgctgggattacaggcatgagccaccatgcttggcccaatttagcataattcttaagggccattggatcttttgcatggtaattgagcactggcttcacagataagacaccagcttcattagcccctaacaagagagtcagcctgtctttcgaacttatgcattgacttttcctttctaggtatggaattcctagatgtcattttattccaatagaaggatctttcatctacattgaaaatctgttgtttagtgtagccaccttcatcacttatcttagctagatcttctggataacttgctgcagcttctccatcagtacttgctgcttcaccttgcatttcatgttatggagatagttttttttttttttttttgaggcagggtctcattctgttgcccagcatgactcatttcagctttgacctcccagctagcgtcatcatggctcactacagccttgatctcccaggctaaagtgatcctctcacttcagtctcccgagtagctgaggctacaggtgcatgccaccatactaagctaatattttctattttttgtagagacagggtctcactatgttgctcaggctgagacaacttcttttcttaaagcttgtaaaccaacttttcttctgcagcttcctaacctctctcagtcttcatagaattgaagagagtatcttgctctgagttaggctttggcttaagggaatgctgtggctgatttgatgttgtattcagactactataactttctccatatcatcagtaagactgttttgctttcttattatttgtgtgttcataggagtagcacttttttttccttttttttcctttttttttttgagatggagtgttgctctgtcgcccaggctagaatgcagtggcagtatcttggctcactgcaacttcagcctcctgggttcaagtcattcttctgcctcagcctcccgagtagctgggattgcaggtgcctgccaccacacctggctaatttctgtatttttagtagagacggggtttcaccatgttggcaaggctggtcttgaattcctgacctcaagtgatcctcctgcctcagcctccctaagtgctaggattataggtgtgagccactgcacctggccaggagtagcacttttaaatttgttcaagaactattctttctcattcacaacttgactctgcagcaagcagtcttgctttcagcctgtctcagctttcaacatgccttccacactaggtttagtaatttttagttctttttttttttttttgagacaaggacttgctctctttcccaggcaaacagaggtggcgcaatcctagctctctgcagccttgaactcctggggtcaagtgatgctcctctctcagcttcccaagtagctcggactacaggcatgtactgccatggctggatggctcgttaattatgttttgtagagatggagtcttgccgtgtttcccaggctggcctcagtctcctggcctcaagtgattgtcccaccttgacctcccaaagtgctgggattgcaggtgtgagccaccacacccagccatttctagcttttgatttaaagtgagaaacttgagactcttcctttcacgtgaatatttagaggccatggtagtgctggaattggcataatttcaacattgctgtgtctcaggggatagggaggaggcctgaggagagagagagagataggggaatggttggtaggtgaagcagtcagaacacacacagcatttgttaattaagttcaatgtcttatgcatgcatggtttgtggtgcttcaaagcaattacaattgtgccatcaaatatcactgattacagatcatcatactagatataataataatgaaaagattgaaatattttgagagttaccgaaatgtgacacagacacacaaagtgagcacatgctgttggaaaagtcatgctgatagatgtgttctactcaaggttgccacaaaccttgcatttgtgaaaaacacagtatctgtgaagtgcagtaaagtgaagcacaataaaatgaggtatgctcgtactctggctctttctatatattgtttcttacaaacaaagtataagtaaagtattgctagtggcatattgataacagtcaactgggcatctaataaagaggagttaggaaaactttaaaattacataacaggaacttaaaaaaatcacaataatttggcttgggccagtgaattctgggctgaatatcaatattgaaggcattattgtagtgtggcaaagtaatgttcataataatgactggccagcagagtaaatattgcactaattttataccaaatgtacttctttatatatcaaatgtacatcttctgtttaagaagatatcaggcttatatagtgcatttgatataaaactcaccaatttaaggtctggagacttaaaaatacagtccaggctagatgcagtggctcacacgtgtaatctcagaattttgggaggctgaagtgggaggattgcttgagcccaggagtttgaaaccagcctggacaacataatgagacatagtcactacagaaaataaaaaagttacctgggcgtggtggcttgtgcctatagtcccagctacttaagaggctgaggtaggaggattacttgggccaggagatcgaggctgcagtgagctgtgattgtgtcactgcactgcagtctcaaaaaagaaaaaccaactaaacaaaaactttaattttctaaacatttaaatgtattgactcttttcctgatgctattacatattagcatatatgttatcaccattatatgtgctgtttcagttacggaatctttcattaccagagatgcaatctgaatgatgtcttgttggatttattatttgtcatttcccaattgcaagtatgtaaattacttatcaaagacatttctgttaaatgagaagaacaaagatttcttgaattgatttgtagtaagctgtgtttttaataatttctggaaaaggaaagaaagcatttttagagaagaatttgttaaaattttaagcctctcaatggcatccattagtataattaaagatattgtagtggcaggctaatctatgttataagtgataagaaacaagtgcttctataaaccaaaagattgtgtttttctaaatttttaagtatttatgggttaatttctagggtggtgtagttcgaacagctttcttgtgctaagatggcaatgattgaaaattcaccttcctggaatacatttttttttaactgaaaacttcagtacagtacagtgtttgttattctatgtgacaggatacccagagttatattgacgaatgtcctgggaacggagttaggaagaaaatacataaggaccccacctgtaactgagggaagtttgagtgatacagacaacttgcaatcagagcaactttcttcatcatctgatggcagcctagaatcttatcaaaatctaaaccctcacaagagctgttatttatctgaaaggtatgtttagtgataactttactcaaaataattatatttatttttatgtatccttccctgttctttttcacagatacattattgctaaatgtgaggtaaatgtgctctgatagctggtattatttttctccccgggtggctggaatggctattggaaccaacagtccatggctaataatgtgtttcagaagcactggccaccatacttgtattttggaaaaatggatacagacacttaatgaaaatctggtaacctatttcagtatcccagtttgtctggtgtaattgaaatccattcctctgacattagtctattgccctctctttttctgttctatttgtccatctatccatctacccattcagtcttgtctgttattttgttttactttaatttttttgaggcggagtctcgttctgtcgcccaggctggagtgcagtggcatgatctcggctcactgcaacctctgcctcccaggttcaagcgattctcctacctcagcctcccaagtagctgggactacaggcacgtgccaccacgcccagctaattttttgtattttttagtagagacagggtttcaccgtgttagccaggatggtctcgatctcctgaccttgtgatctgcctgcttcagcctcccaaagggctggcattacaggcgtgagccactgcccccggccttgtccgttatttttatattcagactctagaattttaactagtacttagtgctcagtaaatagtttttgaatgaatggctgaacacattccttaaaaaaatggtttgagattttccattaacaaatggaaaagctgaattccattgacaaatgtagcttgttgtgccaataagagaaatgcagatctgaagttgcctttgttttaagctctaggagaggattgtgtgtggactggaaataagaaaaaatctgtggcacaaagctagggatggtcagttagtacattctgttagatttataaacttccatttgctacaagcttctgaagcttctctttttattttctgtgttcagcctgtaggatactttttatatagatgaaaagttgattatcctaatttttttccccccaaactatccaaagctaacttctggtttgtatttctattgtaagcctaattacattaaatagtacttatagttgcctttttaaatatctacaacaaattttattatttaaaactctttattttctatgaattcttgaatttttcttcttttggaaaatattttcacctaggttctacttagtgaatcagtaacgacaattttaactttatattttattaggtctcttgctaagttttccccccaaaatgagaatttcagtggcattattcagttactaaatttaatgtgtaattggggaaattagtaatgtatctatcaagtggctcatgcctatgtatctatcaagtggctcatgcctataatcctagccctttgggaggctgaggcacgaggatcacttgaggtgaggagttcaagaccagcctaggaggcatagtgagatcttgtttctgctaaaaatgaaaaaaatgagccagatgtgatggtgcatgcttgtagtctcagctacttgggaggctgaggtgggaggatcgcttgagcccaggaattcaagattgcagtgagctatgatagccactgcatcctagcctgggtgacagggcaagactctgtctcaaaaacaacagccgggtatggtggctcacgcctgtaatcccagcactttgggaggctgaggcgggtggatcatctgaggtcaggagttcgaggccagcctgaccaacatggtgaaaccttgtctctaccgaaaatacaaaattagctgggcgtggtggcaggggcctataatcccaaccacttgggaggctgaggcaggagaattgcttgaacccaggaggtggaggttgcagtgagctgagaccgcaccattgcactccagcctgggcaacaagagcaaaatttcatctcaaaaaacacacaaaaaacaataacaacaacaacaaaagtacctatccacgttgcagtatagctgtttatttccacctcctctgctataccatgagctccttgagaagaagaggtattgtgtcttatttgcatttatacctaggacttagctcaatgtatactaaattttttgctcttgggttaatgcttatgtcatttaatgtaaaattcagttttctgagttgtaaacagagaagtaattttgaatgccctatgtacctcacaaaaatgttatttttcttttcttttaaatctcacttctgagaattctttgagcccataaaataaatgaaaatattaaggaaggtactttctgttggagaaaaagttgtgatgattgagctttaagtcaaatgatgagcaaaaaaaaaagaaaaagattaaaagaaaaaacttatgatgtgccattgcccatggaactcagatgatgtcagtgcacatttatgttgttaagaaaaatcacacttttgaagattgtatgaaacaatcaaattgtaatctgtacgcttctgcctttatgccattctggggctaaggtttaataatattaataggtataatatttctggtcattccccaaaactattcagtgggaacactagctctcctttaaatcctttctaaatagatgtggaatttccaggtggttttgatgtggaccttgaaaattcattcccttagtgacaattttatttgattcatgtatttggaataagcatgaactttggagccagacatctggattaagatattagctatactgctaatacactgacttaccttggacaggtttcttaccgtgtctttaaagcagggataataatacacaccttattgggttagtgtgcagatataaggagatgatccatgtaaagtcccaagtataatgccaggaagttagtaggtgattattaaaagttagtcattatttttgtgtctctcttattggtgctgatatcagaagtattataaaaggatattactatagttgatgttactgaaatcttctacaatgagggtgccaacatgtgttcctgagtccacttatcgtcatcaccattgctgccaaagcaattgttatggctttgttagcctccccatttaatttagcaaatactgaactccttaaaccaagctttagttctttcttcccttaagatgaatttgttaatcttaaccctaagatcatatggaattaaaaaagagcccaaatagccaaagcagtcctgagtgaaaagaataaaactggaggcattacactacctgacttcaaaatatattacaaggctatagtaaccaaaacagcatggtataaaaacagacccataggccaacggaacagaacagagaacctataaataaatccatatatttacagccagctgattttcagcaaaaggtgccaagaacatacactggggaaaggacaccctcttcagtagtgatcctgggaaaatatgcagaagagtgaaactagacccctgtctctcaccacatataaaaaatcaacccaagataaattaaatactttaaacgtaagacctgaaactataaaactgctggaagaaaacataggggacatgcttgtggacattggtctaggcaaagattttttgacttagacctcacacaggcaacaacaaaaaatacataaatgagactatattaagctgaatggcttctgcacagctaaggagccaacccatcaacagagtaaagagacaacttccagaatgggagaaaatgtttgtaaactattcatccaagaagggactgatacccagaatatatgaggaatccaaacaactgaacagtaaaaataaacaaataatcccactaaaaagtgtgcaagtgacataaaaagacatttctcaaaaaaagacatacaaatgacaaacaggtatgtgaacagtgcccagcattgctaagtgtaagggaaaagcaaatcaaaactacaatgagatatcatcttaccttagctagaatggcggttagaaagacaaagaatagcagatgttggcaaggatgtggagaagagggaactctcatacactgttggtgggaatgtaaattggtgtaactattatggaaagcagtatggagatttctcagaaaactaaaatagattaaaaaaaagaaacaaaaaagaaaaaaacaaattttaaaaagaagtcccagctactcgggaggctgaggcaggagaatggcgtgaacctgggaggcggagcttacagtgggccgagattgcgccactgcactccagcctgggcgacagagccagactccgtctcaaaaaaaaaaaaaatttttaaaaagaaacataaaaatagaaccactgtacaatccagtagtcctgctactagtatttatctaaaggaaaggaagtcaatataccaaagagatacatgcacctaccatgtttttttgcagtactattcaccatagcaaagatacagaatcaacttaagtgtcccatcagtggataatggaaatacggtgtctgtatacacaatggaataccattcagccataaaaaagaatgaaatcctgtcatgtgcagcaacatggatggaactagaggtcattacatgaaataagacaggcacagaaagataaatgttggatgttctctctcacatgtgagagcttaaataagttgatctcatagaggcagagagtagaattataaacactagaggctgggaagtgtatgtgtggtggggggcaatggagagaatttggttaatggctactatatagttagatagaaataatatgttttaatatccagtagcagagtagggtgactgtagtgcattgtatattttaaaatagctagaagagaggaattgaaatgttcccaacacatggaaatgataaatacttgaggtgatggataccccagataatttgacttgatcattacacattctgtgcatgtaccaaataccatatgtacccgtgagaatgagttgttataaacctgtttgtcctatttagtctttttgcgcacttctgcttcctcttacacttttctaccatgctatgaagagcaggaagccctcactagaagctgccagatgtagccacccagtctcaaacttttcagcttgattaactgtgagctaaataaatttctattcattatattgtattacctggtctcaggtattcagttacagcaacacgaaacagactaagacatttatatttccctaattagtgaagttgagcattttttcatatgtctattggacatttgtatatcttcttttgataaatgtctattcattctgttacccattttttaaattggattatttgttttctttttatagagttgtttgagtttccttacatattttagatatgtacgtatccctagtgagatgtatgatttgagactatctcccaatctataggttgtctctccactctgaaaatgatttcattggttgtacaaaagcttttaattttgatgtaatcccttttgtctgttttttgcttttgttacctgtgctttttgggtgaaatctaaaaaatcattgctcagaccaatgtcatatagttattcccctgttttggaaattttacattttcaggtcttatggttaaatttttaacccattttgagtagatttttgtatatggtgagaaataggggtatagtttcattcttctgcatatgggtatttagtttttccagcaacatttattgaagagggtatccttttgcagtatatgttcttggtgcctttgttgaaagtcaattggctctaaatatggggatttatttctgggttttctattctgttccattggtctatgtatttgttttttaaagagatggggtcttgctttgtcatccagactgtagtgcagtccatgatcatagctcactgtacccttgaactcctgacttcaagcaatcttccctcctcagcctcctgaatagctgggactacagatgtgtaccaccacacccagctatttttataccaatgtcatgctgttttggttactatagctttgtaatatattttgaagtcagatagtgtgatgcctccagcattgttctttttgctcagtattgctttggttatttggtgtcttttgtggttccatgtgaatttttggattggtttttctgtttctaggaagaatatcattggcattttgattgggattgcattttatttgtagattactttgggaagtatggtcattttaacactattagttctaatccatgagcttgggatatctttccatttgtttatgtcctctttaatttctttcattggtgttttgtaatttccaatttagagatctttcaactctatggttaaatttattcatagttattttattctgtagctattctaagtggaattactttattttttttccagctagttcgttgctggtatatgctactgatttttctatgttgattcagtgtcctgcaattttaatgaatttattagtttttggatggagtatttaggtttttctatatgtatggtcatgtcatctggaaagagggataatttgactatctcttttctaatttggatgccctttatttctttctcttacctaattgctctggataggacttctaggactgtgctgaataagagtcgtgaaggtgggcatccttgtcttgttccagttctttgaggaaaggcttccagattttattcaatcagtataatttggctgtggatttgtcatatagggccttaatcatgttgcagtgtgttacttctgtgcctattattttgagggtttttatcatggggggatattgaatattatcaaatgctttttttgcatctgttgaggtgatcacatggtttttgcccttcgttctaatatgaggtatcacaattattgatttgtgtgtgtcttgcatccctgagataaatctcacttgatcatggtgcattatcttttttgatgtgtggttggattctgtttgctagtattctgttgaggatttttgcatctgtgttgctcatattggcctgaactttttttctcatgtccttgtatagttttgttatcagggtagtgctggccttgtagaatgagttagataaaatttcctcctcttaagttgtttggagtggtttgagaagaattggtgttagttcctctctataagattgatagaattcagcaataaaaccgtccagtcctgggcttttctttgttgatagaccttttattactgctttgatcttgttgcttgttactggtatgttcaggttttctctttcttcctgattcaatcttgtaggttgtatgtctctaggaatttttcagtttccttgagattttccagtttgctggcatatacttgttcataatatcctctaattattctttgtatttctgtggtatcagttttaatgcctcctttttttgtttctgattgtatttatttcagtgttctttcttgttttttttttaatcttggttggtgtagccagtgatttttgtttgtctttaaaaaactatttttattatgttgatccttttaatttttcttactatatttcatttagttcttctatgactttattatctttttgtttctactaattttgggtttagtttgttattgcttttctagttttttgagatgcatcatttggttgtttatttgaaatctttctactttttgatttaggtgtttactgctataaatttccctcttagcactgcttttgctggatcccatatgttatggtatgctgtatttctgttttcatttgttttaatactttttaaatttattttttattttttcccttgatccagtggttcttcaggagcatgttgtttaagttccatgtacagtttctaaagttcctttgttactgatttctagttttatttcattgcagtctcagaagatagttgatatgattttgatttttaaaaagttattgagatttgttttgtgtcttaacatatggtctatcctggagaatgttccatatgctgatgagaagaatgtatattctgcagccatgggtgaaatgttttgtaaatgtctgttaggcccatttgatcaatagtgtagattaagtctgatactttgttgttcaatttctgtcttgatgatctgtccactgctgagagtagggtgttgaaatcccccattatttttgtattggagtctgtctcttcttttagatctaataatatttgctttatatttctgtgttctctaatattaagtgcatgtatatttggaattatatcctcttagcttatctctttatcattatataatgtagttctttgtctctttttacagtttttgacttaaagtctacaaaaggaaaccaaaagcatgacttaaaatttgcaaatggaaaccgaaagcagtcttaaagtttgatgtatgtatagctgctcttgcatgcttttggtttccatttgtgtggaatgtatttttttttttttttcggtcaatgtatgtctttattggtgacgtgagtagggagcatacagttgaattgggtcattttaaaaaaatggattcagccagttcatgtctttctgggttttttttttttttttttttttttgagacagagtctcgctctgttgcccaagctagagtgcagtggcacaatctcgactcactgcaacttccgcctcccaggttcaagcagttcttctgtctcagactcccaagtagctgggactacagatgcccaccaccatgcctggctaatttttgtatttttagtagagatggggtttcaccatattggtcaggctggtctctaactcctgacctcaggtgatccacccgcctcagcctcccaaagtgctgggattacaagcatgagccactgtgcctggctcatatatttcaagttggcaatttaattcctttacattcaggctattattaatagatgaggacttaactcctgcattttgtaaattgttttctgggtgttttgtatatcctttttttctttcttccacttttatcatttatcacttcagtttggtggttttctgtagtgacagtgttcaactcctttgtcattttcatttgtatatctgttcaacagttagttttgtacttttaggtatgttcattattttagatagtgccattttgcttctgggtgtaggattttcttaagcatttaatgtaagtagggcctgtctagtggtgaagagttccctcagcttttgcttgtctgggaaaaactcttactcatttatgaaggataactttgctaggtatggtatccttggctggcagttttttttttcttttagtactttgaatatatcatctcattctcttctggcctgcatgttttctgtggagaaatctgctgtttgtttgatggagattctcttataagtgtctagacatgtttcttttgctgttcttagaattttcttgttgtctctgacttggtagtttgaccatgatgtgctgcggagaagacctttgtattgtatctatttgaggatctctgtatttcctgtgtctgtatgtctaaatctcttgctggatttgaaggctgaggtgggaggattgcttgagcccaggagttcaaggctgcagtgagctaggattgcaccactctactctagcttgggtggctgagggagaccccacctctaaaaaagtaaaaattaaaaataaaataataaaaataaatcttttgctcaacttgggaagttttcagctattatttcttgaagtatgttttctatccctttgttttttctctttgccttctgggacattgaaaatggaatatttggtcattttatgatgtcttatatgtcatgtaggctttcttcattttttaattctttttttctttttttatgtgtctgttttttcagaagatctgtcttcaagttcagaaattcttcttggtctagtctattgttgaagcttttgattgtattttttgtttcattaattggattcttaagttccaggatttctgtttagttcttttttttttctggatatctatttatttcctgaatttccccttcagatcctgaattgttttcctaatttcttcatattatttatttgtgttctcttatatctctctcagtttaaaaaaatcattattttgaattctttttcagatattttatggatttccttttcattgaaatatgttattggagaattattatattcctttgtacatgtcatgtttcctttttcatgtttcttatgttcttacattgatatctgcacatctggttgaacagttatttcttccaattttatgtattagcttttgtagggaaactttttcctgtagatgtgtatatatagtgttgcttgagtaagatgctatggctttgattctgtctgaatgggcattatggtgcagtctgtgtataatttttttggctataatcaacgtcagtggtggctgtgttcctcagtggcttaggtttttgttgttagtggaggctgtggtgaggctctgctgagatggagactccaagcaagctggcccttagatacctgtggtggtggtggcaggctggatgtgctggtccttggacccccaggcttctaacagttgtgctggtggtggcaggtcctggtgggccagttcttgggccttcaggtgggcttgctcaggtgtcatggtggcagtggtggttcatagacttttgtgatgtgtgagtggcattggtgatggtagtagctgtgtctggtcaatccttattccttaagcactgcacaagtgggtgtctgtggtggctgggctagccagtccccgaacttccaggaggcatcaggaactgcctgcaggaactgccagcaggctgggtgggcctatgcctaggctcccagacagtgcatgtcaggtaggcttgtactcagtccgccagaagccatgtgcaggagccattggtggtgtgctccctagtcgatccctagtccccctgacaatacatgtgctcattggcagtgatggcagtgggtaagatggacttgtcctctagccccactgatggtgtgtgcagatggttacagatggggcaggttgattttcaggctcccggaagaatcatgggggtaatgacttaagcggtggctggcaggaagtacctgtcctcacgctccctgatggagtgcacaggcagtggctgtggcaacctgggtgtgtcatttcccaggcctctggatggcgcactgtggtgctggcaatggtggtcatgatggctctgtggacaccagcagtggtgggcagggaaggccccaggtccctgaatgatgtgtgtgggtgccgccagcagaagttgtgagggggcaggtctctagtcaggctccccagtggtgtgtgcaaggctctggccataatgggtgggttggattaatccttagacgtgttgacagtgcacttgggtgccagcagtggtattggtgggtggggtgggcctgttttcaggccccagaatggctcatgctgcctgtgatgttggtgggtggggtaggcctattgtcaggcctctcaatggtatgtgctggtactggtggtagttggtatggtgggttgatttttttaatccctggacagcacattcatgtgctaatggtggcagtgagcagggctgacctagtcttatgctctctgattgtgcatgtgggcaccggctgcattgggtagggctggttgcttcccaggtccctgaaccatgcactcaggccctggtgatggtggcagtggccagggaaggcatgtactcagtcccctgtatggtgcacatgggtgccagcagcagcagttgttagggtccattgattcccaggctcccagatgatgtacttgggtgccaacattggtggcgttggcagggcttgcctatttttaggcccctgtatggcatgtgctagtgcctgcaacaggtaggagacacttattctgggggcctgggatgtcagctgggaaggctggtccccagaccctctgaagatgtgtgcagatgttgtagcagctctgcccctggagggagctgggttgctgttagtgcctaggcaggcacctctcagactttgggagaacatgctttgactccttttgtcctgggggcaaccttcctggagcattgcactacttgttttctggcacgcaggatactgtctgggctagagtgctggggatctggccacactactggttccagccaaccttgcaatgctgcagccttctaggtggatttggggaatgttagcaggccttcagggatgtggaaatagaggggctgttgggcctcagggcatgatgtcgtctgttggtaactaggctctcaaaatggtactgcgttgcagctgcttgagtctcaggggatgtgtgggatccagcatgatctctccctattgaacagtgcagttatgtggactccaggcagcccccatattagtctcaggtcctgccagggccaaggggctctcctttacctaggattacaagagtcttcagtggaacatggacttccggggatttcttgcttaccttttcttcacagcaaggagtctgtcctggctctgagtgcatcttagccaggacaattgcttcatttccctttttctgtgcctgagagattccctgtcagttctctgctgaattacagtgttattttttaggagctctatttgataggtggttatctaacagctgttttggttcttaattgtggaggaggcaagtgccagatacctctagtcagcctcttgaagcccctcattaattttttttttatccatgtattcttgtagttcactgacgttctttaagaggattattctgtatttcctatctgtcctttcacagatctttcttcaaggtcctgttgttagcggctttgctcattttattttggaggtgtcttgatatcctgatttttctggtccttgtgtccttgtcttgttgtctgctcatttgaggagagctaccttttttagtttttacagttttggcagagatggaccttctccatttagtctggcttataattctagatgtgtcagctggtaatgatccttggtagacagagtttgctgttgggttctctagatgactgggctgctgcctttgctctgagtttgggtaggtcagctgactgggctttgctatcgactgagagcactggaggagctctgcaattcatttgagctctggatggtagtgcaattgtcttagatggagagggtcacaagatgtattctctggctgtgtgatactgctatttgagttcagcagttggacggggttgcaggagaggccctaagtttaggtggagttgcccatcagatggataggaccacctgctttgctaagtaaaaatgcatagttgacgttagactctgcctatgtggggccttggtgtaggctttgaagctggactgagcactgtttaatctcctaaatgtggcagatttagcccctgccttttgccaaaatctgctgtagtggtcatccttgtccttgggtggggtctgagggtgggctttgaggttgtggggtgtgttcacttcatttacttatgtgtaattcctcatgagaagacattcaaggtattttttttgtctatatgtcaatgcttcagtaagtggcacatatatatatactgtatatatacacacacacatgcacacacacacatctccatatatttattctagtaaatcctttcagtttgaatctgttatactctaacaagattaggtgttacgattaaactttttttgataagccgtaggcaaaaatatataattgttttcattaaattgtcttcatttcattcgtcttttattttttgtattaggccattcttgcactgctattagtgaaatacccaatactgggtagtatgtaagaaatgaggtttaataggctcacagttctacagactgtacaggaagcatagcagcatctgcttctggggagacctcaggaagcttacaatcgtggtgatgtcacaggatccttgtggtgttgcttcgccagctggtgacctctttccctgagttttacttgggtctgctgggcttgttctgcccacttggcctggcaggctgtgcttggctcccactactggcccggattccatacctgccaacggcgagccaggtgcagagtggcgaggggtgtgtgagcgagtgagtgctgggtctagccactgtgcacagccaggcatgtcggctgtggtgggacgggcagctccaggtgctggcacgggtgctggcttcccacaagactgcagttggaccagtcgtactgcaagtggcttccactgctggcactggggattgaggtggtgcccagaagcttggagacaccaggaactgcagagccccaaagagggtgtcacagccctggctaggggaactcttaggtgggctcccttaagggccacagctcttctttccttctgtcttctcttcttctagtcacccgcaacgtggcaagagtgtgtagcaccctttttagccctgtttgtattatagctcttccagtcctgccacttggcaagtcctgaattcttgtcctgtgttcaggaagaattaggtatgtggacaactggagggtgagtaaggtaaagtggtgttttattgagtgacagtacagctctcaggagacctgaagtggatagctcctatttgcaggcaggtgatcctgtcgagtatacagctctcagctgagaggggacccacagtgggtagcttctctctgcaggcaggtagtcctgatatctgcccaagtctggctgagtccaggggtttttatggcctttggagggtaggaagtgcacgcttattggtccataggcagccatggctcagcctggagaaagcaccataagttgtcactctggtccacggaactgggagcctgggccccagacttcaggctgtcccaggcctgaaggaggggcttcactggggacactcccctttctgcccaggaactggtctgcctcccactgccatcaacctcctatccccagtgcccaggcagttcatgctgaggggtgcctgcaggcccacactgagctgccctcagcatccccttccctcctgtgctcattggcccccaaagtccagagggggctgaggtggcagggggctggcgtgtacccgagcatgtgtacacctggccaggttgtgacagtgcctcgccttggcctcaactttgctctagaattggagtgggcactgagagtggagaggctgggcagtgggagcagacacttctgagtgtgcgggggcatgggggccttcctgggctccttagagtacaggaatgcccaggtttgcagctgtggctatgtggctgcagcagtgctggggaaggcaggactcccgcccctccaacttggaaggagggtggggcttctgcctgttcccagctcccaccagctctgtggaatttgcagtcccggctgtgcctcccccactgcagccggcctctttgcagcagctgctccagatgggctgctgctgctgccatcagtggaaagcaaagggggagcaggcacatcacatggtgaaagcaggagcaagagaaagagtggggaggctgctacacactcttaaccagatgtagcaagaactcactcacttatcatgaagacggcaccaagccctgaaggatctgctcccatgacctaaacacctctcaccaggcctcacctctagcatggggatatagttcactatgagatttggtcagggacaattatccaaacttaatcatttttagtgaatatgttttaaaaaatttcttatatgagtttctgttagtatttgtccttattagggtgctcatctcttattcattttaaaaactctcattaaaggtattgactctttgtaatatgtattgtaaattgtttttcaagtttgctatactacactttctttatagtatctttgatatagaagacttttagtttattttgcaaaatatgttagtgtttaattcctgtgttttggcttatccctggcaagacctctttaaccccaaatatggagataagtcagccagctactgttctcatttgtactgctttagatgagctatcaattcctgaacaagtctgtagattactttcctaattgaagttctgattctttttttgcccttccattataaatatttattaagaactcccttttaggtcagactgagcagaatgttttagtatttttaaattttacttcccattgggatttttagaaatactttataactgctaatgtaaagaagtctaatttaatttctaaataatatataccgaattgtattagaaaataggcttgggtgtggtgactcatacctgtaatctcagtgctttgggaggccaagataggaggatggcttgaggtcaggagttcaagatcagcctgggaagcatagcaagaccctgtctctacaaaaaacttttaaaaaaagaattagtcaggtgcagtactgtgtgcctgtagtcctatctactaagaaagctgaagctggaaggttgcttgagcccaggagttagaggttacaatgagcgatgatcaagccactgcactccagcatgggtgacagagtgagaccctgtacctaaaaataaaaaaaagaagaaaaatatttcataaaattatgttttacaaaagtaataaaggttttattgtagctagccactcagcagggattggtaattagccttgagtgaaagggatcaaattgctattttaaattgcaagactctaatatagacttccaacagagggagcccaaagcttttaaatggaagtggaggaggtttcatttttattaatgtattccagctctgtcatagtttcctatattcatgtcagttgattttctttttaagctttcctttggtaatttggtaatgacaataatccacataaacactaaagaagatactctattttgagatcattttcccctgttaacttaaaatttctcttctatgttttatgtcataaattttcttctgactagcaatttgaaaaacactgatacaaatagtgcatatatcctaagttcaactcctttatgctagaaacattagtcagttttgaataaaattactaataatgatactcatttgcacggttaactcttgaacatttgcattatatggttatcactcttttcaaaataatatttcattattatctatatgtaatttatgtaaacatttaaactttttcctaatttgaacaataatgcatatttatattaagagatatatagaaaagtatgaaattgatattacccataatccattcctcaataataagcattgataatattttgatatgctttcatctaaatatttttctggattaaatgattataatcatgaaaaatagtgttatttttattcatttcacactatcctcttttgatattaatctttactttaggcctatgagatagataggagagcagttaatatttctattttataaatgtggaaactttttgaggttcaaagagattaagtggcagaggtagaactataacacaggtctaatatatatgagatgcatttaagttaaaaaacataatgttaaaataaacacccaaatgttcaccttctattaaaaaatagactattatcagcatcaccgaagccttctgtgttccccactttgcccattctgtcccattcccatgcattcgccttagaattaaccacttttctgaattttaagttttatataattgtgaactttagaaaaatgattcaggttactgaacaatatgtattacatggcatgcattttttttgcctaacatttttgtgagattcattcatgttgatgcatagagctagagatcatccagttttacttatgtatttattgtattaatattaaaaatagatctacctactttttattgatggagtttggattgtatccagttttttttctctcataaacaatgctcctttggacattttcattttatatgtgttgccagtaaatagtatgtatctggatacttctctttttacattcagtctacatttatttttaactataaggcatagtctgtttatattttatactactatttttctttatgctttttatttggtctgcttgactttttttcctttcttgtatttttttttttttagagataggtcttgctatgttgcccaggctggagtgcagtggctatttacaggcatgattatagtgcactacagccttgaactcctggcctcaagtcagccttcgaagtagcacactataggtgtgcaccactgtgccccacccattcttgtattttaaaaattagttatgttttgttttgtgtgtgtgtgtggggggggggcggtggtttgctttacgttctagaagatttagactctttctatttttaaatagttttctataaattataatatacttgatagacctatcaaagtccaaagttaattagtatctgtgttctcattttgaataatagggactttaatctattttaagtacattcacattattgtacaaccattaccaccattcattttcagaacttttttcatttttaccaaactgaaactctgtatctatgaaacaggaactcctcattcctctctccccctaaaccctgacagccaccattctactttcagtttctatgatttatttcatgaccctaagtaccttaaataagtggaatcacagtatttgtcctttgctaactgacttatctcgcttagcatagtgtcttaaaagttcatctatgttgcagcatgtgtcagaatgttcttcctttttaaggctgactatattccattttatgtatcaactaaattttgttctattcatctgttgatagatagtggtgttgcttctacattttggctattgtgtgtaatgccattatgaacatgggtgttcagtgtgtgtttgtatctctcctttaagttcttttgggtatatatccagaagtagaagtgctggatcatatggcaatctatttttagctttttgaggaaacatcatactattattcatagtggctgcaccatgttacattgccaccagcagtgcacaagggttccagttactccatatctcgccaatacttgttttcgtttttttgataataaccatcctaatgcatgtgaggtggaatctcattgtgattttgattttcattttcctaatgaatagtgatattgaacatcttttcgtgttgttggccatttatatgtcttctttagagaaatgtttattcaagtactttgcctgcttttgaattggattttttttgtaagttgtaggatttctttatatattctggatactgatcccttaatagatatgggatttgcaaatatttcgtctcattctgtgggttgcctttttactctgatgaagtctacgtaatctgtttctttagttgactgtgcttttgttgtcatattcagaaatgttaacaaatctaatgtgaagattttcccctatgttttcttccaagaattttcaaaatagctttatgccttatgcttaggtctctgatccattttgtgttaattattgtatatggtgttaggtaagggtacagattcattgttttgcatgtggctattcagtttttccagcatcatttgttgaaaaggctgccctttcctcattgaatggtcttggtacccttgttgaaaatcatttgaccatgtatttgagggtttatttctgggatctctattctgttctgttggtttatgtgtctgtttttatactagtaccacactgttttgattaccgtagctttacagaaagttttgaaatcagagagtattaatcctgcaactttgtactttatttatttattggtaggttttttttctctgaacacttaaaagatttcactccacagtgttcttacttgcatggtttctgagaaatgagatacaattcttgtctttgtttttctatagttaagggcttatttttttctggattttattaactgtttttaaatctttgatttttttgcagtttaatatgatatgcctaggtgttattttttgggcatttattctctttggtgttctctgaacttgccagtctgtgatttggtgtctgacattaatttggggaaattctcatgcattattgctttgcatttttcctctgtttctttacctctttcttcttatgatattcccattatgcctatgctacacctattgtagttgtcccacatttcttcaatattctgttacgggtttttttagtctttttttctctttgctttcctgtgttggaattttctatttctatatactcaagttcagagattctttccttttccatatcctgtctactagtgagcccatccaaggcattgttcatttctgttacagtgttttgatctttagtatttctttttcattcttcattacactttctctctgctaacattgcccataagtgcttatatgctgtatactttatctgttgatcatatttgttttaaattcctaatctgataattcaacatctctgacatgtctggttctggttctgatacttgttgtcaaactgtggttttttttcttttagagtggcttttaattttctttttgttttttgtttttttttggatagttggacatgacgtactagataaaagcaactactgtaaatagacctttaggaatgtggtggtaagatgtgagaggaagaaaagcattctgtagtcctgttaggtttcagtcttttaacccatttatgcttagtgttctattactggaacgctaggcatgtggaagttatttatatcctactgctaaaggttatcaccaagctgtgattgcaaaaattcaaaaaattgcaacctcaggcgttaatgagcctttgtccttggcctgttaactttacaagtgcttctcattctcttctgaatgctttggtgcaacagcatacctggaatataatgaagttagatatttcccttctcccacatggaaagctagatggtcttggaattgtgtattttccttgcttttcctcacacagaatgctagacggagctagagttgggtattttttatttcccctgcttgattaagctctaaaaaataactcatagtttaggctctggtgaaatagtttttcttgagggcaggccttgttaagaacagaatgctctgatatatttgaaaatgttttccttcctctgctgaaccatgaggggatttttctgatattcactgtgagaacctggttgaactcctggagataaaactcacaaaagtgtgcgaccccctttatgactaagtcctctgggatttttaactcttagacttatgtacactgaaccctcagcaatttgtcaattgcagtttaggtcttcatactccaatagtagttactgggactgtttctgcttgtgggtttttgctttagtaagttgcgattctctgtattcacctggctgtctttctcccattttgggggcagccattcatcctgtgacttcacttttctgtcacgtccaggaagagttgttgatttttcagttttacccgttaggatagataacttccaagctcctttcatgttggactgggaactcctgtgtattgcacttcgtttgatgcagttttgggtttaatttctcttttttattttgatgctcttagtttatcatttattaaaagtttaccatgtatgtggttgaatccgatcatatttttctctataatttctttacttccattctcaagaaattcttcttccacaaggctaataaatatagtgtttttcttctgatggttgtttaaaaaaaatcttacaacttttagtcattagcatatgatagttcattttaccttagagtattggatgtagttctgaattcttttttttctctcttgttacccagttagtccactacaactgaatttgaaagctttgtttcccagctttgtttcaaattcttctgtttttttttctttttgcattttttttaattatactttaagttttagggtacatgtgcacaacgtgcaggtttgttacatatgtatacatgtgccatgttggtgtgctgcacccattaactcgtcatttaacattaggtgtatctcctaatgctatccctccccgctccccccaccccacaacagtccccagagtgtgatattccccttcctgtgtccatgtgttctcattgttcaattcccacctatgagtgagaacatgcggtgtttggttttttgctgtttgccagccatttcttatatactagtctgtaatactatactttacttgttgatgttactctgtattatgttttattatgaaattagtagaactagttctcctattcccttcatttattgtatattttaataccttttttgtattttaaagattgtaatagaatatcagtaacctaaaaattgccattttaaccatttttaagtgtacagttcactgccattaagtacagtcacatatttgtgcagccatcaccaccattcttttccaggactttttccatcttcccaaactgaaactctgtatctattaaactctaactccctatttttcccttcttccagtccctggcaatcaccattctactttctgcctgtatgaatttgactattctaaatatgtcatcatatgaatggaatatcagtatttgtcttttagttagtggcttattttttcttagcataatgtcctcaaagttcatccatattgttgtgcaaccattatcacaactttttcatctcaagcagaaactgtgttaccattaaataataattccccattctcccctctcctaatcccctagtagcctctaatctactttctgtctctgtgaatttgtctattttagttacctctttaagtggaatcacacaatatttgtccttttgtgtttggctgagtttacttagcataatgtgttcaaagttcattcatgtagcacttatcacaagttcattcctttttatggcccaataatattttattgtatgaatataccacattttgtttttcttttcatttcttgatggaccctaaggttgttttcaccttttggctattgtgaatagtgtgccacagtgaacagtggagtacaagaatctgttcatgtccctgctttcaattcctttgggtatatacctaggagtgggattgcttggtaactttgtgattatgtgtttagcttctttttttttttttttttttttttttgagatggaatttcgctcttgttgcccacgctggagtgcaatggcatgatcttggctcaccgcaatctccgcctcccgggttcaagcgattctcatgcctcagcctctgagtagctgggattacaggcgtgcgccaccacgcctggctaatttttgtattagtagtagagacggagtttctccatgttggaaaggctggtcttgaactctcgacctcaggtgatccgcccgcctcagcctcccaaagtgctgggattacaggcgtgagccactgtgctcggcctgtgtttagcttcttatatcgcagttctctatttagctttttgaggaaccaccaaaccattccacagtgactgcactgttgaacattcccaccaacaatgtacagaggttccaatttttctacatttttgccaatgtttaactttttttaatgaaaaaaaaatttttttttaaattactctgtcctaatctgtgtgaaatggtatattgttgtttgggcttgcatttccttagtgattagtgacgttgaacatcttttcatgctaattggccatttgtatgtctttggagaaacatctcttcaaatactttgcccattttttaattgttatttattttttgttgttgagctgtaggaggtctttattattatcagtattaatcctttaatatatatgtgggtgggagatattttctcccattctgtgggttgtcttttcactagtgtcctttgataaacaaaaatttttgattttttttttttttttttgagacagagcctcattctattgcccaggctggagtgcagtggcacaattgtagctgccaccttgaactcctgggatcaagtgattctcccctcagcttcctgagtagctaagactacaggggcataccatcatgcccagctaattattaaattttgtgtgtgtgtgtgtgtgggtggggtgaaaccccataatgaattatgttccccaggctgttcttgaactcctggcctcaagcaatcctcactcctcagcctctcgagtagctgggattacaggcgtcaactaccatgcccagccataagttttcaattttaatgaactccaatttatctttgttgttgactgtgtttttgttgttatatcaaagaaatcactgccaaatctaatgtcataaagatttcccctatgcattcttctaagagttttatagttttctgccttatatttaggtgtttgatccactttgagttaatttttgtagatggtgttagataactgtccaacttcttccttttgcatatgactatcctatgttcacagcaccctttattgaaaagactgtcccttccctattgaatggtttcagcatccttgtcaaaaatcttttgagcatatatttgaaagtttgttcctgggttctgttttctatttctatggtcgatatgtctctctttattctagtaccacgctattttaatacatttttataattttaaagtatatttgcttggctatttaaaaaaattcttagaattttgttgcattggaaaatatttattttgagcttttattacatttacttgttaacttgaataatgtgaatatttatatttcttgttcaggaacttgggtgtttccagtccattcatttccttttcttataagaggatggaagctaacagtgtttgaacattgctgtccttatctttaaacacgtgactttccaccatgtacagtttagaaccagattgtcatattctgcaaaaaactgttatttggattgagattatattacagatgtgtttggcttcactgttgtgcatttgaatcatatgacattaccttttgaaaatactcatttttatttttggtttcatgccaactacttaatgcttagcgtttagtcaagaaaatcctctgttataaagtcttttttctacaaccatataacttttaatgtgatttacatgtgaaatcttattttgtttttcagtgttcattgtgctagaaaaacaaggactattacactgtttgcttcttatatcaggggaaacataagtacctaagcatctttttagatcgtcttttaggtcacattttatttttgtttatagtgcctgtagtgataattctttcagggaggacaaattttttttgacttctcttttggttttcattttcagtaaacaaaactctatggtataaatttgcttagatgcccttattcttcaagaatgattcttgagggttgaggagtggaatgatttgactcagtcagaacctctttgcaagtgaaattggctcacccttacgattttgattattttggccttttaatttccaatctgaaaataaagaaaattttaccaaagtaaatatgaaaatgagcagtgtaatagcagcaataaccctttctttaactatgacactacactggtgatgtttggatactgtagctttttttaatttataagtcatttttagccttccaaataattctctcaaaacaaggaagcattacgtgtaattggtctttatagtccttgtttttgacttatactagttgccttagttgtaaataatttatatattttaaaattatgaaatacttcaaatatgtacataagtatagagaataatatgccaatacatatcactcagatttaaccaatataattcctattttttcagatttaaatttgtttttaaagaagtattatagaaagttgaaaacttatttattttatattccctgattctaatactctccctctttagagttatctactacccaaataggcttgaatccttccagtctaagtttttatattttgtttcatatgtatgcacttatacattatagtatgttttatatttctaaattttccttagtagtaacattgtgactatcattccaaaatttgttattttaccagtaccttagactttaaattattttctctgtaggtaaaatttattaccacatactactgaaaatttgttaccatacttttggtatatgaaccacgcttgaaatatattaacattcagctttggcttataattgtttgcctatacataggtttaattattgaggtacttgtgtccttggaattttactttttaaacctaatttaatacttgtatagtattactcttttgctcattttgcatgtacacaatcctccaatgttgatatctcattttttttccccctaaacacacatggggaatttaaaggtagaaaagggaggataacttatttcttaaatctgagttcaatattttttttactacccagatcttatagtctgccatgtgggactgtgtttgtaatgtgttggatttttaaatacatgctagttggcttctaaattcatttgggctttattagaattgagtataatacagttctcttttgcaggggctcacaacgaagtaagacagtagatgacaattctgcaaagcagactgcgcacaataaagaaaaacgaagaaaggatgatggcatttctcttttaatatctgatactcagcctgaaggtttgtgaaccttagaaaactgttggaatttgaattttttcttattgtattaataataatttttgttataaataaattattttattttactttgaaaggatatgtgaaagtaaagggagattatttggcaacacaaataaaattgctaaacctactctttatgtagcgtagtactcatttctagatttatttactaatcccaaaagttaaattttaatatatttttttcttctttggggagacttggatatagctatgaagttatgttcatttagctgtttctaagtgttgtttccatggatattaatgttactgctaactgggtttttattattagctaatcactgtctatttgcctaccatgaaatacattctctattcattagaatttctctcaacttcaggaggatgccaaacaagccactattagcaaatttgaaggtaaatacttcctagacttgtgaaaattttttgtaggcctccttgcatataggatttatgattcgacttctttttcttttttgcctctctttcaagaattaaaaatattttactgatacttgaagaaaaacaattttactacattatttatttgtgaaactaacacctttaggggtctgttggattattgatagcttcaaatgttgttgaagtctctttgttgcttgctttctttcttgcttttctctttctctttttctttttaagacagggcctcactctgtcacccaggctggtgtacagtggcatgatcacacatgatcacagcccacttcagcctctatctacctcctgggctcaagtgatcctcccacatcagcctcccgagtagttgagactatagtcatgcaccaccacgcctggctaattttttgtattttgcagagacaaggtcttgccgtgttgcccaggctggtctcaaactcctgggctccagtgatctgcctgcctcggcttcccaaaatgctgggattataggcaagagccaccgcgcttggccactgttttatttttgagtgatttcataagttattcacaatacaaaaaaatcttttgatgatgctgtgcaaaaattcattacacttcatttggagcacagctatttaaagattctttttagtagcctttttaatagaaaaaaatttaaaatgaaactacagtaataacttttatttgtacaagaaaccagctgaaactcttataaaggcagtctttggagaatgtgctgtgactttgttcagacaagcttccaattagtcactgtcagtgtataatgaaaaacatttattttcttataaactgtacttttcttagaagtaattacaatcatctctgtgtatctttgtgttctgcatctgtagattcaacctagcaaagatggaaaatatttgaaaaaaacttcaataaaaataatacaatcataaaaaatacatataacaactacataacatttatgttgtattgggtattataagtaatctagagattatttaaactatacaggagaatgtatataggttatatgcaaatactatacctttaggggcttatggatccatggagtttggtatcctgggtccctgggaccagtcccctgaggatactgagggatgactgtattgattaccaagtaaaaatgtaagtatttgtacaagtgggctcagttcaggtactatcaagacaaagattcctactctacccaggaaagcagtagaatgtgaggactaacagtcctcacattgacttgaataaaatactttctgatttgtacccaggagtgttacctcaagatcacagtggcattttagacatgcatcagggaagagtacatgacaaaagaaacattttttagtttttcagtatccctgaaggtaccactactggtagggaaagtgtttctaatacaattagctattgaatctttattaaagcagtgtttactctcctacatctgataccagttattttttaaaaacctgtaaattaatggaaattctgaatgaaatcttaggtgtaccatttttttccatagcacattaagtttgccttgtggaatttgctttcaccaacataataccttggaaatacttagtattcttttgtttacaggattttgtcacctctttagttttatatgctagtaatatttgcaggttgaattatatattatgcaggtggaattctatttttacaatatttcattctatataataaagttattcctttttccatgagacaggcttgactgatgtgcaaataataaattgtttaaaagaaaactcctgtataatcaagtttttctcaagcccctttcctttcatgaatcattttactgtagtataatatttatgtttagaaattatagtttgatacattgtgtgtagaaattgtattagaccacttttatagtttacaatattacatataaaatttaatgtgctatcctaaatattgtgttgatgatttggggggagttttattttccttagggagtaaggtgttttctctggaaattgaaaggcgattgactatcttggaatttttaccctcaatcctgttccagtgccttcctttaagtaatgtcaaagacaaattatcatgaatattagttattaggaattgttgaagctacagtaaaagcaagaatagtttgaagagaagatgtatggtgttgaagaacgttccgtgaatggaaaagtcaggccagtcagatgaattgaaaattgtgaattaaaggcaactgctttgtgacttgctgtgtataaactttgagttggtacttgtatgacatagattcagaaagcaaaataattcaggataacttttagtcaattaggtggaaacttttggaaggtatttttgtacagtacatatatttgataacaaatattaaatatttttagtaatgattggcatgagtttcaaaatgatgtcttgttgacttaaaaaaggaagtacttctctagaatgatggatttattggagacttaaaatgacagggtcttgattattgaaaagaagaaataaactggcaagtaaattggtaaccttgtgaatgatcacatattatagccaactacagagcaaaggtattttgtctccttttaaagagcagtgatcaacactctttcaaattatagtccctttccactaaaaatatgtatttatgtaaattacattttaaaagacttagtttataaagtcacattgaattatcaaactttaagacatgaattttctggattttaataagacccccccttttttattattattattatactttaagtcctagggtacgtgtgcacaacgtgcaggttagttacatatgtatacatgtgccatgttggtgtgctgcacccattaactcatctttcacattaggtatatctcctaatgctatccctcccccctccccccaccccccaccctacaacaggcccagtgtgtgatgttccctttcctgcgtccaagtgttctcattgttcagttcccacctatgagtgagaacatgtggtgtttagttttttgtccttgtgatagtttgctgagaatgatggtttccagcttcatccatatccctacaaaggacatgaactcatccttttttatggctgtatagtattccatggtgtatatgggccacattttcttaatccccttttttttttgatagtacagccaaatgcatttatagcaaatggaaaaacagtttggtggctttgctttggctactatgaaaaaggatatttcttctttatatatttttctcacctcacaactattgtataatgaacatttacttggtatataccaattaaaatagggcatgcctttaccttcatccagtgtcagtatgagaatttaacagtacatttctgttttaatgagctttggaagtagtatagcaatcctgatgatgttacttcgagcttttctaaaagagattctctctatacttttttgtccatatttatgcttcatttgttttttaagaccttaacagtggaagtagaggttgtgatcatctcgaacaggaaagcagaaacaaggatgttaaatattctgattcaaaagtggaactcactctgatttccaggaagacaaagagaaggcttagaaataatttacctgattctcaatattgtacttctttggataagtcaacagaacagacagtaagtagaggtatttagatattataggaaataatttcatgctatgataaaaacgagttgactgtggccaaataatgttcctctagctttcagcttttattatgagatttctttagtttttggttcactgttagctttattattaaaaaacaattctaaatgtaacttttcttggtgatacagagttattggaacacatttcaaatactatgaatgattaaaaaagttaaaattgcttattttcttgtatcgctctttccttagtaggtagttgtacatccttcagacttttctttttctttatttcagccaaatactattcatactgtctagtcatttttttttgcttgctctgtaaaattattattagatttattttatcagtagcaatttacttatcaaattctttaagcttctgtttatctagagtttagggaatttattctaagtaaagaattatcatattaaatacatacattttctattttcaaagacttagtatataagtagcaataaaacagtaagacagcttttcaatttctttgatccataaatcatttcaggaccttgtaatgtttttgggttgtaattataaacatgattcagatttatatagtaaatgagatattgaaggcagtggttgattttcataatttttaatgttgttatattgttaatttttaaatttttttaccaaagtagttttaccaaagtagtcacattggcattattacttttgcaaaataaaaatatgtaaatacatcttctcattctaaagttgacttagatcatgggagaccgtctgacaaagcatttgtaatgatggaaatctcccaatttcaccctttaaaaaattatcaggcatcagattggacagaccaaatcctgtatctttaaatttgggagacattggcaagtataatgtagtataattgtttagttttctatccatgtagttatagaagtgatataatatttttactttaggaatttaaaaatggtttaagcaagccaaatttgaaaaatgctatttttttctatgtgtttatgtttagaaaaaacaagaagatgactcaacaatatccactgagtttgaaaagccaagtgaaaactatcatcaggatccaaaactgcctgaagaaattacaactaaacctacaaaaagtgattttactaaactatcctcacttaacagtcaggagttgactttgagtaatgccaccaaaagtgcctctgccggttcaaccactgaaaccgttgagaactctaattccattgatattgtggggatttcttccctggttgagaaggatgagaatgagttgaataccatagaaaagcctattctaagaggacataatgaagggaaccaatcactgatctcagctgaaccaagtaagtgacaggaggattataaagttacttaatttcctctgctttacttagttatttttttattcttcttgaacaaatttggctaaggccataagctgtttatgacatcattgtggaatatattaactttaggaaaaaagggcttggggtttggggtctccttcatgagttttaaaatatcgatttaggtaaactaatggaggacttgaaaacagaagtaatttttttcttagattagtaagtacactgtcatctcaatagttttaaaatagattatttaaagaccatcattactgtcatttggttgatgaattatgcagagtttaagtgctatctgattattatcattaattttcatttaatcagcttctgagtagttgatgccatcacatggtacaaagaaattccaaaggttttaaaggatctccagtgaatactcgcccacatcttcccctagttattaatttcccattccttgaagcaattcatgtaacaggacttaaaagtacaatttagagtgatggcacaatacactgttagaactagaatttgttactaaggcctcctcatggctttatccatttttaaacatctttattctttagaaggtaagggtacaggtaactgctgaataattgcgctgatatagagtcattgtctgtaactactataaatcagataacaactgataggcctgtttctaaattgaataaatttagatgattcagtttaacaggattattaaaaataaattgcattaattagaaagttctttttttttttttttttttttttgagacagagtctctctctgtcggccaggctagagtgcagtggtgcgatcttggctcactgcaacctccccctcctgggctcaagtaatctccttaatcagcctcccaagtagctgggattataggcatgtaccaccatgcccggctaatttttgtatttttgctagagacagggtttcaccatgttggcctggctgatcttgaactcctgacctcagggaatctacccacctcagcctcccaaagtgctgggattacaggagtgagccactgctcccggccaaaagttctttttttgatatgtgattgttacacatttaaaatacatttttcgtctgggtgcagtgacccacacctataatcccagcactttgggaggccaaggcaggaggatcacctgaggtcaggagtttgagaccagcctggcgaacatggtgaaaccctgtctctactaaaaatacaaaaattagctgggcatggtggcgcatgcctgtaattccagctactcgggaggctgaggtaggagaattgcctgagcccgggaggtggaggttgcagtgagccgagatggggagactgtgtctcaaaaaataaataaataaataaataaataaacaaaaatacatttttcttttccgttttagttgttgtttccagtgatgaagaaggacctgttgaacataaaagttcagaaattcttaagttacaatctaagcaagaccgtgagacaactaatgaaaatgagagtacttctgaatcagcattgttagaactaccattgattacatgtgaatctgtacaggtaatttatttctgtcttctcatagattaacaatgaaatgtacactattggttaatgactgttatttgttttatcaagctgaatattgtaatgaaaattacaaattttcttagtttgaattttcagacaacttttatagtagtttgagtgaaatacgtagttgtctttattttgaaatgaaaagattatgccattttcttctggtgatttatatttttcagtctgaatagtctattacttgaatatttttctttttttatggctttcattggacatttcactaacattttgtagaattaaacacattttctagtatttatatgtctggtcttggagtattatggctacttggaattactccttttcctcacatactatgaaggcagtatgatatagaggaaagaacatggctttggagatataggtcagaaacctatcaagtttggtaagtcctctgcctcttcattcttatagaaaatcataaatggaagtgtgttagtttaatatcagtcgattaattcagtcctttgaagagagtaggtctaaaataaggttcaaatcatttattatcagtattctttctttctttctttctttctttctttttgagacaaggtcttgccctgtcacccaggctggagtgcagtgacatgatcatggctcactgcagcctcaacctcttgggctcaagcatccctctcattcagcctctcaggtagctggcaccataggctcatgccagcaagcctggctaatgtttttaaaatatatactatttttagagatgagggtctctctttgttgtccaggctggtctctaactactgggctcaagcaatcctcctacctccacctcccaaagtgctaggatcacatgcatgagctaccgctcccagctggtactctttcttattattagtctgtgattattctatttgtaagaaaagatcattgaccaccagtgcagaattatggtaaacttatcttgttttgtttttgaataatgtcagaggctgttattttgcagagtatgatgaagagttggcccgatctatgaaaacagtttggtctgattattgtttcatgggtattttcttttgtatttggtattccacgtagaaatcacctcagcagctttgttctgaatttttgcaaaaatgtaaccatttttaccagatggggtcaatatcctacttgatggtttagttgtatatataattaaaagtgtcattattgataatgaatttaaacttgtagaagaattaggtcttggcagggtataaattgacaatgtagtatgaaatgatcatattataagaaaataacatatcttgtggaatttactacattcataatcacaaccaagcagccaatactgtggagatctacaaagacatataaggcagaatgccacatctctatgctctctcttgttccagttttaaatgaattatgagaaatatggattggtcatttttaggagccagctagtttttacaaaatgtgaaacccaatgagaaattatttctataccaacttctcattttatcactaaaaaagcccacagttatttgtctgactgatgttggagctacctgatttgatttgattgattgattcccttttttacttagggaataagaagatattaatagtatactaagcaataaaacatgagaatgacaaagaaattcaattaagcaggtaaatggcgttatgagctgggtttaaaataatgagtatgatatatgttttagataaggattagtcacatttgcgagaggtaagaggggagtgagtacatatgcataataactgctttagtagtaatctgtttggtaatgtgtgatgttacggataatgtgcagaggttaggcacatttgaaaaagttgaaaaagtcatctgaaagtagtgtaaatttcagaagaaacagtgggaaagagttgctgctgatattgcctggttttctattataatttaaaagcaaagttatatagtcacttgagtggaagtgatatgatttttgaggttttaggcaagtataagccatttctggttggttgtcttcaaacatagagtatacaataaagcatataaatttgagataacagatggttcttaggtacttacattccttcacggcatattaaaagtgcagtagcacacaggcataaagatgggaacaatagacattggaaactccaaaagtagggggagggttgaggagagccagggccataaaacttcctgttgggtattatctgggtgacaggttcaatagaagcccaaccctcagcatcacgcaatattatccttgtaacaaatctgcacatatgccccctgaatctaaaataaaaaaattttaaagtgcagtagcaagaacattattttggttaatggaaacaattttatgtggttgaagtgacactggacctggagagagaaacgtgcgtttgaatctttgttttgcttcttactaatcgcatgattttaggcaggtcgcttaaccaatctaaacatctgttaactttatttatgaaatgggaaactgaaaaacctgcctatagggtggttgtggggattaaaagagataatatatttaaaaacctattttaaacaaaagtacaatatatgtttaaaactttcttctgtcaagttaaaaatgaataaaacctattagagactattgaatgtgaaaccatggctttgatacagaggagtatatatttctggagcttaggctgtggaattaattttggattcagctatttagtgtaattttctcaaaggtaagtcatatattttttcagaaaaaaaatctagatagctatttcttcacagtaagaacagtataaagttcttcaaaaattcactaatagtaatttaaagaagaatttgatggtgaaagtcattttcagcatttatatagtacttaagaattatatgcattttatgatttattccttgttagatgtcatctgaattatgcccatataatcctgtcatggagaacatttccagtattatgcctagtaatgagatggatctacaactggattttatatttacttctgtttatattggtaaaataaaaggagcttctaaaggttgtgttacagtaagtatattttctttaattttcttttagtttggatcttggacaaggcattttaatttttttccttttttttcttagcacaaataagaatagaattaagatttattttatatgggacactttggatatgttgaaagtcattatacctaatttgaaatgtgtctttcattctcccctcctaaaatcctacctaatctgactactctaatgaaaatcatgtgtgaaaaaaaatcacatgtattgataatctttgggttctaaaagttatttgatggtaaagtaaaatttttttcaaggtatagtttggagcataaagaagaaatcttgttttaccagtttaaacggttgtaaactgacttctccaaatttctaaattaaggatatccaggaactaatcctacgctgtttttctaattaaaaaagaaaatactcctcctcacccactgtatatgaaagtgagactggattctactcggttctctattttttttttttgggggggcggacagagtctcactgtttcacccaggctggagtgcaggggcgcactccactgatcttggctcactgcaacttctgccttctgtattcaagcgattcttgtgcctcagcctcccgagtagctgggactacaggtgcgtggcaccacacctggctaatttttgtattttttggtagagatggagcttcaccatgttcgccaagccggtcttgaactcttggcctcaagtgatccacctgcctcagcctcccaaagtgctcggattacaggtgtgagccactgtgcccagccagttctctatattttcttaccattttgaccttttaaaatcctaatcatcttttaaagcttctctgatatactgactcttccaggaaactttccctaatccctcctttttagacggaattaacttctccctttgctatacacttataacacttcatttgacttctaagatttattctgtgtgttttataattacctatattcttatataaacttctccattaaccttttaagctgcttatggtgaagagccacagttttagttccttttatagcttccataaatgtttccactctaagcaggcacttaaatgtttgttgaagtgactgtgtcagatttagtaactcaggcattttttatagcagtttcattcatatttcactgtgttagggataaggcagagaatataaaaatgctaagatatggtttctgctttcagggagcttttaatctaatggaagagacagacacataaatatttactttacattatggtaaaatataaaacagaaatatgtacaagaagggtgcatatggcaatggatatctatcaatgtctggaggaatcaggaaaggcttcacagagaagacagcacatgaataagacatgaagtacctgttgtttacttggtacccatgcagacaaagacctaatcccaaattctgggaactgcaaataatagtagtttgtgatacagtcaccattgcttcgaaagctcaagaatgaattaaaattaacatttttttggccactggttttaactgattttggcatgtctggggtgattttacaattctttttctttaaggaattttattcatttttcaggattttctcccctattttactttattattttaaattcaggtttacccagttatttctgttgagttctttttgatggcaaaaagttggataacctaaatatatgagagtgatgattagccgggggaaggaaaatccaatataaatattaaacaatgggatttctattaattaatatattaattatattattacacagtcaggtggacatgttatgctcaaaaaccaagatcaagcaaaaaaccacaaacaaattagtaaaggaacaatattacaaacacatataatcttgcctatttagagacaactgccattcactgtatagtatatatcgttgcatattcttcatacatatatagatacattaaaacaaagggatattacataatatgtactattttgtaacttaccataatttcattaatttaattcctctacttattttgggatatttgggttgtctttaaaaatttttaattgttggtcatttcaaattgtcccaatattttactattacaaacagtagggaactgcaaatattcagtaagcattgtaaagtggtcctaaaaattaattgtcagaagtcctggccagggccatcaggcaagagaaagaaagaaagtacattcaaattggaggagaggaagtcaaactatccctgtttgcagatgatatgattctatgtctggattctatatatatatttatatatattatatataaattttctagatataggatctcagcccaaaagctctttcagctgataaacaacttcagcaaagttttaggacacaaaatcagtgtacaaaaatcactagcattaatggcttttccatattctttatatgtggacaatttttctcaagggtaatagctttcctgtgaaataaggtgtaagcacagattaaaagttttgccacattctttatacttgtaggagttttgccagtatgaattatcttacctacaatcaagtgtggcaaccatataaaggctttgtcacgttttatacatttctagggtttcacactagtataacttttttttttaatgtattgcaaagttggaggtgtttgtacaagtactgtcacatctttcaggtttgtagagttccttttcagcatgaattatcgtttgtctcttaagaattgagaacttatgactaggcatggtggctcatgcctgtaatcccagcactttaggagactgaggcaagtggatcatctgaggtcaggagtttgagactagcacggccaacaaggtgaaaccccctctctactaaaaacacaaaaattagccaggcatagtggtgggcacctgcaatcccagctacttgggaggccgaggcaggagaatggcttgaacccaggaggcggaggttgcagtgaggtgaaatcatgccattgccctccaacctgggtgataagagcaaaactctgtctcaaaaaaagaagaaaaaaaaagaattgagaatttgttgtaggctttgccacgttctttacacttgtagagtttctgtccagtatgaattatgtgtaataagggttgagaacttccttaaaaagctttgtcacattctttatatttgtagggtttatgttccatataaattctcatatttactaagagttgagggctggttaaaggttttcccacattcatcacatttatagggtttctctccagtataaattatcttatgcttattaagggttgaggaacatttaaaagatttgccacattattgactctgtaggtttcctgtgcaatatgaattattttatgtttattaagggctgaggaccagttaaaagctttgccacattcttcacatttgtaaggtttctctctagtatgagttctcttatgtttagtgaggcttgactaaaccaggtgaaggttttgccacattgatcacatttgtagggtatatctccagtatgaattatcttatgtttagtagggtttgaggaacagttaaaattttgccacattcttcacatttgtagagtttctatgaattatctcatgtttaataagggttgaggatgaaatgaaggctttgccacatttaacacacttgtatggtttctctccaataagaattttcttatgtgaaaaaaggggtgaggggtggttaaaagctttgccacgttctctacatctgtagggtttctctccagtgtgaattatcttatgtgtagtaaggttagaggcagcttaaaggctttgccagattcttcacatctgtagcgtttctctccagtatgaactttcttatgtgtagtaagggttgaggactggttaaaagctttgcctcattctttacatttaaaagttttttttccagtatgtcttatgtctgtttgactttgaaaatttatgagagactttcacatatttatcacattgaaatatttttctctgggtagttgtcaaacattggttaagtccattataaccgcttttgtgcaccttacactcatccacacttttacagctttttttaaactgtaaattgtcatgtccacatttttcatatcttctcagtatcactttttggaaagaatcttttatgctctgctctggccaaagatcttgggcaaaatgagaacatataactgggggtctggcaatcatcttatgtctcttcgtagtcaaaggttttttcccttgttccagacaggtcatcaggtctggcttagagacaacaataccaaggaagaacaggtttctgtagttctctaacatcacatccttatataaattccactgtgcagtgtccaggcaatgccactcctcgcggtggctcacgcctgtaatctcagcactttgggaggctgaggtaggtggatcacctgaggtcaggagtgcgagaccagcctgaccaacatggtgaaaccttgtctctactgagaatgcaaaaattgactgggcatggtggggcatgcctgttgtcccacctacttgggaggctgaggcaggagaattgcttgaacccaggaggcggaggttgcagtgagccgagattgcgccattgcactccagcctgggtgacacagcgaaactctgtctcaaaaaaaaaaagaatgttcatagttaataaaagcattaaaagtgcaattactgtcaaaaattctttcagaaaatataagcctttaaagtgaagaagagtatttattctgaagacaaccgttacaaatataaagggggttgtagtacctttacttgtatcacagatcttattgcacacattttgtactagaggaaaaccctcaagcaattgctcaagcttttttcagcatcagggaatttatattggagaagagtcctgcaaatgtaatgaatttggaaacacttttttttttcaaaaattactgcttagaaaacaccagagtttatatgaaaatatatttttgccgatgcagtaaatatgaaaaaatatttaattcaaaattgattctatgtaaatatcaaagaatttacagtagaataaggtactgacacttcagacattacacgaaatcagagtgttgagtataaaaactaatctacaactaaagttgttaaattatttgtatataactttaaagggagtagattttttgaagtattgtaattacattgaaaatgtacttgtttccttgaaaaaatttttttgaaaagtgaataatgatgtaatacagctttcaaattactttatgctgttattttattcctattgtattcacatgggaaagcatatgatcaattgttgctgcatcagagatattagaaatttttttattagttgggcattatttatgaccttttctataaatgaataaggagattaaaatgtgagatgcatgatgaaaatgtaagtggagaggctctttgtagttaacttacattaagtaacgtataaggtaggtgttcagagtaatacttttcaacattatagtgagaggaaggaatgattaattatagttaaaagtatattcaaataaattactatattattttactaattgtacttttatgtaataaaatgcagtacattaaaaaaaaatcactagcactcatatacaccaacagcaacaaagccaagagccaaatcaggaatgcaatcccactcacaattgccacaaaatgaataaaatacctatgaatacagctaaccagggaggtgaaagatctctacaatgaaaactgcaaaacactgctccaagaaatcagtatgacacaaacaaatggaaaaacattccatgttcatggataggaagaatcaatagaattaaaatggccatcttgcgcaaagcagtttatagattcagtgctattcctatcaaattatcaatgatattcacagaaatatgaaaaagtattttaaaattcatatggagccaaaaaaaagaggcctgattgccaaggcaatcctaagcaaaaggaacaaagctggaggcatcatgttacccagcttcaaactgtgctatagagctatagtaaccaaaacagtatggtactggtacaaaaacagacacataggtcaatgaaacagaatatagagcctggaaataaagctgcacacctatgaccatctgatctttgacaaagcagacaaaaacaagcaatggggaaagcactcactattcaataaacggtgctaagataactggctagccatatgcagaagactgaagctggaccccttccttataccatacacaaaaatcaactcaagatggattagagacttaaatgtgaaacccaaaactataaaaaccctggaagacaacctaggcagtatcattctgaatataggcacaggcaaagatttcatgacgaggatgtcaaaatcacaacaaaaacaaaaattgacaaatggatctagttaaactaaagaacttctgcacagcaaaagaaactatcagcagagtaaacagacaacctacagaatgggaggaaatatttgcaaagtaggcatctgacaaaggtctaatatctagcatctataaggaacttaaatttacaggaaaaaaacaaccctatgaaaaagtggacaagggacatgagcagacacttttccaaagacatacatgtggccaagaagcatatggtaaaaaagctcaatatcactgatcattagagaaatccaaatcaaaaccacagtgagataccatctcataccagtcagaatggctattgttaaaaggtcaacaacatgctgacgaggttgcagaaaaaagggacacacttgttgggggatgcaaattagttcaatcattgtggaaagtaatgtggcgatccctcaaagagctaaaaacagaattaccattcaacccagcaatcccattactggtattatacccagacaaatataagtcattctaccataaagacatatgcatgtgaattgcagcactattcataataggaaacatatggaatcaacctaagtgcccaacaatgacagattggataaagaacatgtagtgggagtactatgcagctaggaaaagaataagatcatgtcttttgcgggaatgtggatagagctggaggctattatccttagcaaactaacataggaacagataaccaaataccgcatattctcagttataagtgggagctaaatgatgaaaactcatggacacaaagaagggagtaacagactctggagcctacttgaaggtgggaggagggagaagagcagaaaaaataactatcgagtactaggcttaatacctgggtttcaaaacaatctgtacaacaaacccctgtgacacaggtttacatgtatagcagacctgtacatgtacccctgaacctaaaataaaaggtaacaaattttatttatgtttgctggaacatttcatataattagattaaaaacttaaatgtttaattataggaaagtgatttagcaattcaaagtaaatatatgcatgtgaacaaaggctgagaagaatcctacaaaaattaggacagttatgatggagagaatataagcaattaaaaaaaattttaagtataatgaataacctaaaaaagggaaaagggtaaaaatttcaggtttttcaggtttttaggtatattctttttcagacagttcaggatgcactgtaacagaaattaaagaacttttttttcttttttggtgggtaaagatattagagaattaaattaatttattctccatacattcagtgactacctactatgtgttaagcattattgtagacactggagatactgttctgactctcacagtagttacaatttagctgaattagaaaaatacttatagctggaaattattacataaattagagccatgttcctatagttagacactggttatttttttagtgtagcaaatgctgcaataaatgtaaacattgtctttcttaaaagtctttgttgatagtacgagaaattaagtaatactatattcagataactattagctattgtaagaaattataaaatagctcttattattagctttattcttaagtttaaacaaagttggtatgatttcagagaactaggtttaccttactgccacaaaatttttcttatttttaaatctaggggttaagtctgctgggagtagggttttaactctggagaggtaacctattggcttagtcattattcagagggataaatgaatatcagatccttgccaagtagaaacatttgatagctcccgagcatttgatgggggaaagtgagagaatagtgtagtaagtagtgggtggggacatgcagatgcactacttctactttataatttggaagttatggctgtgcaaattctgaaaggcaaacaccgcttctgtttattttttagtactaatgatttacgtttgccaagatatattttataggattaaagaccctgtgaaacatgccagaaagagtttggaaaggggcagtatacattaaatatggtggcagttatatgaaagtaacaataattagatatttgattaaattatgtaacattcttgatcagatgctagtgtctaatgataacaacttccttgattaaggatcttactaaagctggaaaaagttcaataagttacctaagtttacctacttactacttgtgtaagtggtagagacagtagaggcaggattttaactccaagctcagcttttagttaattatgatctattgcctcacatttggttttcatggctcacttactctatggaatatagggttttatatttgtgaaagtacaagatgaaataatttttaaattggaaaataagtggagtcaaaataaacctgtggtttcactgaacattgtttgatacttaaatggagctcacataccaagaacattttgatttcgttttgtgctcacagaccatacccgatttgatcaacaaaatgtattgaacaacaacaacaaaacttaaccaagtaataaataaataggtacaaattcatttgatattaatggaaacacaaacttcaaagcagaagtctgctttagatagtacatgtaagatttagctaggtgctccacaaccctattataaaagcagctcttaaggaagtcagatatatacaaaaggtacctagagaaaataagtgtcctgggacagaaggagcagaaagagcaagaacctcagttggaagggaatttataacatgaaacaaagaaagatgaatgctaggaatgaagacggtggtgcccacctaaaagtcatccagggaagagggtgttctggcttagggacttaatttatattaccattttgacaggtgcatcactgctgtgaatgaagttgaatctatgacttttgtagccatttcacattaaacaactgaattttttagttctgcttttatgtggtaaaagcaaattttaaaattataattggtagtttttgtacagaaacagaatattcacatcaggttggacacaagccttctgacaattttaatttctcattataaaatagtatgttggcattttggtttgtttagcagtttcttgtgagtttggttagtgtgagttcatcaccaagggaatcatcgtcagctgctgagtcagcaaagccaaaaatgaaactctgttttatggactatttatatttaccagagtcactgctacttagaggtctcttggcagtttcttctgggctttgtcttagtctttacattttcagaaaacatttttgaaaaatatatttattagtcttactggtttttgtaaatgagcatattgagaattaaattacttacatggggttcttaaaatttccataaaactaagtctttgtagtgaaatattttattggtttattgataaaaaggcttgagcacttataatgtagactttgaatatgtacttgtgatttgaaaaaaaaaatttgaatagtaacacattttgagtggtaactcattgtttgctttttaattttttcttcagatcacaaaaaaatatattaagatcccatttcaaggtaagttatcattctcttatgaacttgtctttttactatagtttttagtataaatttaagtaaaactaagtttaataatgtttcaccttaatattttttagcaattccaaatggagtaaaaatgttttataatggacttgttctgaaaatcgtatgctattgttttaatgactataaatcaaacagtgttaaaggattcatggtgatttcttaggattaacagaaacacagttctgatagatagcaacaatattttggtatatataaaaatggataacaatagtaactataagaaaagaagcataaggaaaatgtttaatattgcacacaaacatgtaaaatgtttttgcatagagggtaagagaatgttatacaattgcatatcttagtaagggaaagtagactggaaaatgtacctgtaacttatagagactcacaccattttctcattctcttcccaactgaaaacctttcagaataaattatgacactaagaaaaccaatatacaatagaggataatctatttatataatgaattctaaaaagaacaaggaagaaaaacacacaaatggcatagataggaattagagaagaagaggcttctgttccaagattggagatgctatcaaagtagctttagttggattagttggatttagttggattccacagatactttatgtacagaatccaaaactatgttatgataattgttctaataatttgattgcttactgtatcttaattaagtattaagaatataaagggcacagaataagtatattgatagtcctaaataggaaatattaataaattattaaggaataatatttgttctgtagaagaaacaaaaaaagtcatgtgattttaaaaggggatgataatttcagaaaagatagcactacagtttatagttaaagacctgggtaacagagctgcctctcaaattcttgcgatacaaacatcaaaaacgatattttagattttcacagttaatatttataatattgctttcttattttataacttttctattgcatataatttttaaaagaaattttattacagattgtggaaaaatactctcttcagtgataataggtttataattttataatgaaagaagaaaatattagtcttcttcctcaagtcctgtccaagttcccataaatctttttaaaacaaagcatgcatataaaggtttttgtaggtgggaacctgagggtctaaatgtttccactttttctgtgcagctggggaaaaattgatttatccgtatttatattaggtattaattatgtttggctgttagtaacaatgcataaagaaaatattttatttttctttcacatagaagaaatccagaagtaatctgaactgatgtgatgtttccttggtcatcgggggcacatgaccctgacacatgagttgcatttttctattctgtcattcctgacgtatgacttgcatcctcaagtttatctcatggccattattgtagctcagactccatcatcatattgatattttagacagaaagcagtaggaaggggaaaccgtaaacagagcacatgctaccaatctcttacccttttaaggagccttcttggatgtccatgcgacataaccttttctgcttacattttattagctagctagtcaagcccacacacccgtttgtaaaggaagctaggaaatagagttttcaaaactgtgtatcttgcttccctcagtaaaattagggttctgttactgaggaagaagaagaaatggataagtgggtaggcaactcccacttttagtatctgctatacacctgtaacagaataaaccatatattaggggcagacttggtaatgaggtataaatttttctcatgatggtgttaaattccctttttttaaaaagataatctttttttaaattattattattatactttaagttttagggtacatgtgcacaacgtgcaggtctgttacatatgtatacatgtgccatgttggtatgctgcacccattaactcgtcatttagcattaggtatatctcctaatgctatccctccccggaaaccatcattctcagcaaactattgcaaggacaaaaaaccaaacaccacatgttctcactcataggtgggaattgaacaatgagaacacatggacacaggaaaaagataatcttttaaagttgtcttcctaaagaaaatttagctttcattctaaacaccaagaacaattagattagtagtagttgtgtagatttcacagaaataggatcaaatgtacctatggggctgtgagcttcatgagaaagaaatgctgagtagcattctgagggctctcattctggttttgatttaagctttgctgccagtttttactgacagttttcagaatggaagagttacagtatgaagaatagaatgactggcttgggaacattaagatgactggtaaatactcatcatggaaagattttcatattttaatgttcatgtgaatcacggggttggagtgggctattaaactgagatctgctggttcagtagatgtaaggtggggcctgatactctgcatttctaacagtcttccagatgttgctgatactaatgtcacaagctcagcttagactatactttgagtaacaaagttctaggaaataatgctgggaggaatactaagaggtgtgtttcaaataggtgcccatcttgggtttacgcttgactgatatttgtattccagttcagttgcttgctgtcttgcagttgaactaagtgaccttcaggacttctttaaatcagtttttttttttttaatgtttctttgaattaaagagtaaaagtcctcagaggagattcctttagctccctaagagggagaaagaccaataatttagaatgatcatctagaagttttgagaaataaaacctggaggaattttaaaagaaatgtctccttagaccattcagaacctcctaattttcttgagactcttttgatagtggctcatctgtatagcggaatgcaaatgccttaggagaagaaagatgggcaggaattggcctatgatagcacttgtgatcttggtttatatagtattgaccaatatagaaaaggtggaaatatatcattttctgagttatactgtgcttagttttctgcactgatagacatttttttcctttttgctaacgattatcagaattcctggagagaattctctccagacagagtttttatgctatgaatatttaatctcaaattttccctctctggttataactgaaatcatataatgtgagagattcaatctctatttaattgtcatttaataattatttagcccttcctaattgtaatgtgatttatttttactctaataatactgctgggggcattttagctaaggttagcaaagtgcactggaaatatatttttgaaaaaactatataattctctttttttaaaaaaaagtagtgtattaacaagtgtcatataatgtttaagtggtgtattcttaaatggattaattttttaaattgttgtcttttatttgtttcagtgtccctgaatgagatttcattgctagtggataccacacatttaaagcggtttgggttatggaaaagtaaggatgataatcacagtaaaaggagtcatgctattcttttcttctgggtctcttcagattatcttcaagagattcagacccaattagaacactctgtattaagccagcattgtgagtataaaatgatttctaaatttcaggataacttgaaattgtcataaatagttttttcctaaaataatttaatagaatgttatttcagtgaattgaaattaattttatttagtgaaaataattttgtttctttttttttttttttttgagatggagtctcgctttgtcacccaggctggagtgcagtggcactatctctgctcaccgcaagctctgcctcccgggttcacgccattctcctgcctcagcctcctgagtagctgggactacaggtgcccgccaccgtgcccggctaattttttgtatttttagtagagacggggtttcatcgtgttagccaggatggtctcgatctcctgaccttgtgatccgcccgcctcagcctcccaaagtgctgggattacaggcgtgagccactgcgcctggccctaattttgtttcttaattttaggatagattatttaattcacataatttctccttatagttgtattcaaccaattgaaattctcatctaaaataaaaagaatagcttaaaaaatcttaaatgtttaccttgaaaattttaagttcttaaaaaaagaatgccttatcttttagtcatttgccatgtttgactactttccttcctttttttctttttgtttgagacagaatcttactctgttgcctgggctacagtacagtggcatgttcatagcttcccacaacctcaaactcctgggctcatgtgatcctcccacctcagcctcccaagtagctgggactacaggggtgcagcaccatacctggcaatttctatccttctttcttctttcttccttttttcttccttcttccattttcttcctcctccttcctcctctttcttcctccttcctccctccttcctcctcctcctttcctcctccctcctcctcctttttttaaacagattgaaatcttttattaaattttttttttatttccatgggtttttgggaaaccggtggtatttgattacataagttctttagtggtaatttgtgagatattagtgcacccataacccgagcagtatacactgaacccaatttatagtcttttatccctcacccccttcctaccctttccccctgagcccccaaagtctattgtatcatttttatgcctttgcatcctcatagcttagctcccacttataactgagaacatgggctgattggttttccattcctgagttacttcacttagaataatagtctctaatcctatccaggttgctgtgaatgccattaattcattcctttttatggctgagtagtattccatcatatatatgtaccacagtttctttatccactcgttgattgatgggcatttgggctgcttccacatttttggaattgtgaattgtgctgctataaacgtgtgtgcaagtatcttttttgtatattgacttcctttcctctgggtagatacccagtagtgggattgctggatcaaatggtagttctacttttagttctttaaggaatctccacactcttccatagtgggtgtactagtttacattcccaccagcagtgtagaagtgttcccttttcactgtatccacaccaacttctattattttttcattctttgataatgaccattcttgtgggagtaaggtggtatcgcattgtggttttcatttctctgattattagtgatgttgagcattttttcatgtttattggtcatttgtgtatcttcttttgagaattgtctattcatgtccttagcccactttttgatgggtttgtttttttcttgctaattaatgtttgagttccttgtagattctgaatattagtcctttgttggatgcatagattgtgaacatttttttcccactctgtgggttgtctatttactctgctgactgttctttttgccatgcaaaagctctttagtttaattaagtcccacctatttattgttgttttggttgcattcgcttttgggttcttggtcatgaaatctttgcctaagccaatgtctagaagggtttttccaatgttatcttctagaatttttatagttccatgtcatagatttaagtctttgatccattttgagttgatttttgtataaggtgagagatgaggctccagtttcattctcctacatgtggcttgccatttacccagcaccatttgttgaataaggtgtcctttccccactttgtttgtgtttgctttgttggacaatccaaatctgtaaaggggaagtcaaactgtcactgtttcaggatacaaaattaatgtacacaaatcagtagctctgctatacaccaacagcgaccaaattgagaatcaaatcaagaactcaaccccttttacaacagctgcaaaaaataaaaataaaatacttaggaatatagctagccaaggaggaatatagctagccaaggaggaatatagctaacctctacaaggaaaactacaaaacactgctgaaagaaatcatagacaacacaaacaaatggaaacacatcccatgctcatggatgggtagaatcaatattgtgcaaatgaccatactgccaaaagcaatctacaaattcaatgcaattcccatcaaaataccaccatcatacttcatagaactagaaaaacaatcctaaaattcatatggaaccaaaaaagagctcacatagccaaagcaagactaagcaaaaagaacaaatctggagtcatcatattacctgatttcaaactataaggccatagtcaccaaaacagtatggtactggtataaaaataggcaaatagaccaatgaaacagaatagagaacccagaataagcccaaattctttcttctccttttttttttttttttttttttttgctttctttttttctagagatgggctctcgatatgttcctcaggctggtctcaagcacctggcttcaagctatcctcctgccttggcctcccaaagttttagtgttacaagtgtgagccaccatgcctggccaactacctttcttatgagtttcttgcccttggtcatgacaaactctgacagaatttgcagcaaagttaaataaaatatagaagtctttgccttcagtctttagtttctaaaaagtgaaattcagtttacttatatattattcctttaagattcggttgaatactttcccatatgcacctataacacttatctatataatatacatcttgagatatttttcaactttgtttagtctccagctcctgaaggagttgggtttagaactacatcaatcaaatttagtaaggttctttcttacctgtttgatccctctacctttttcctactctcctgcacagtaaagatgttaagtagtgaactaaattttataactttcaaatttgttattttcctgtcctaattacttctactaggaaaattcatgattaaatagcagagaaggtggggaaaatagaaacagccatttataagcattctgtgggaagagaatgtcttcagatcaccattgaaatgactgaggagaaaatgtaggaggtgtttaattggaatatgtttctagttgatagagttgattcataaaggaggctagagaaaaataattattaattattcattcatacattcattaacaaatgtttattactaaatgtcaggcactgcagatatagcaatcagtactattatgacattttagtgcagtagaacaggagtccaccaattgtgagttttggttctggattactaatggcctacttttgggatattaatttgccttggttattacctaaaatacaaaatacttggggttatattccaaccttactattattaataattaaattacttgtattataatcctcttgaaaaataatactattgatacaaattattttttccttttgtagcaaaatctagtgaattcattttccttgaactacacaatcctgtttcacaaagagaagaattgaagctgaaagatattatgacggaaataagtataatcagtggagaattagagctttcttacccgttgtcttgggttcaggcatttcctttgtttcagaacctctcttcaaaagaaagttcttttattcattattactgtgtttcaacttgttctttccctgctggtgttgctgttgctgaagaaatgaagctgaaatcagtatctcaggttagcatatcattaatataattggcagagaagggggaggttcagaaaacatttattcattgatattaggctgctttcaaatgctacattttgtgaaaagggcataggaaccaacccaaaagaactcccgttgccaatgctggaacaatttgttaaacaaaatcaataatgacagcatgggattataaccaaataaaaaataaatattagtctatatttatataaatagataactgagtaaatgaatgaataaataatacatggtggataagggacaattatatcttagaaaaaaatccaattaataaatgaaaaggaataagagaaatacaaaaccacaagtagaacactatgtttatgagtattgcaaagtccaccaacagatgctaaatttaatgagtaaaaatttaagtagaaacaaaatatatgcataatctcaaagtctctagcataaaatatgtattatttacaaaaagaaaagtggtaactttgcagtggagaaaccttgtagacatcactttaaccaagttatcaaaatgaacatcaccagtaataagacatgttgacataacacaccccttcgtatcatgcactgagaagtaccacatcacttctgtggtgttctttccagtaatatgtaatctcaatataattatgagaaaaatgagacaagtcctgttacaaaataattgaccagtactctttagaagtatcaaggttggccggacgcagtggcttacacctgtaatcccagcactttgggaggccgaggcaggtggatcacgagaggtcaagacattgagaccatcttggccaacatggtgaaaccctgtctctactaaaaatacaaaaattagctgggtgtggtggcgcattcctgtaatcccagttactcaggcggctgaggcaggagaatcgcttgaacccgggaggtggagattgcagtgatcgagattgtgccactgcactccagcctggctacagagtgagactgtctaaaaaaaaaaaaaggtactaaggtcatgaaaaacaaggaaagactaaggaattgtaggatcctgtaacagaaaaaggatattaatggaaaagtgaaatcaaaatgaagtctgtagcttagttaatactattaggccaatgttaattttttagttttggtcattgtattatggttgtgtatgataagattaggggaatttgggcaaggttgatttctttcaactcttttgtaagtctaaaattatcttgaaaacaatagtaagttttaaaatgctatgtttatttttataggaggttggtaatatacatgtagcttgtatatctctgccaaatagttctagaaagaaaagaatttattaagaagctatggcatactcatatatacacctgtgcacatgcatgcacatacacgggtttggccagaggctaatcttttattcaaaaggcctatagaaagccacattagtgttagataaagtataagacttcatctctatctttctttatgtataatgttgtcaatattttgcatcctaattatattgtttatatattttccatttagtggaattacattattataaatgtagcctcttaattttaaattttatttcctcctatttattacattttttgattattttgaactgcaaaattgttatattcttctttaattctgtagtccatatctgcaaatagtacttcaagttaatctttgaccattgtttatacaatatcttttcatcaccagtattattttggtttggttatatctatggaaaatctaaaagtatagatataattcatagggatttttaaagtcacattttctctcacacgtctacgttttgactttgttcttttgaaagttatgatgtttgagaccctttttcttgccactttctgtcagccctcaaacacagatgcggccaagcctacttacaccttcctgcagaagcaaagtagcggttgctactccctttctattacatctaatccagatgaagaatggcgagaagtcaggcacactggacttgttcagaagtatgtactgtcatagcatgtttgtagtagatgggcatattagtagtttttattcatgttgctgcttttcagtagtttaacttttgaaatgttttaagttttactttcatgctgatagtaatggaaataggtttttttaaagaaattatgaggaagttaaaaaatttattaagaaaacaataggtgccattttacttttatgtcagtaagacataaatggcagacaaagtgtcatatttggtaagattaaagtgtttattaaaaacatttgagtagcaatgtatgattttaaaaattctacattccttatctgaacatatgatagggaaaatgaaattgcttactgaaatatgcttcaatttaaggtactttggagtttgttacaagttctctttcagaaattgcttctttgttcatatttcatccatgtcttctcatggtgctaaggaagaatatggagtctgtgcatttaatggtgatttctgtacctccatgtgattctatttctttgttttgaaaaaagacacttgaaagactaggataggaaaatagccaataaggtagaaactatcatattagcactttaaatttacagttttcttttttgatttaggtgccatgatactaagattaaatcaatgtggatgactcttaccatactgaacctttctggcgcaagaagtacatattataccttcattactgactacatttttcattgagtactgctctacctattccaagattatagcccggaattcacaactggtcttatttctaagctttaagagagaatgccagcaggaggatgactaattagttgtcatctcttctctactactttctggttgtgattaaattatatgtctcctttgtggtctcttaagttttatgtggcaggcactttttatggggagacttgcctcctaagctcccatgttatttcttttttgtccagctgctggtatagattagccaccaggagcagagcacaatttttgactgctggcttttctgaaaggaagggaactagtcttgaggattcaaacttagaaagcggagaaaggaaaagctatattttattacatcagtttattcaaagttaaaaattatgaagaagagcaacatcttcaatggtataactgattgtgagataaaacctattgattagagactaattcagatagtagcctattaagactagcccacatgggaagtattggaaaagaaaagataatactcaatcggagtaccattagtagcttgtgaggataaaggaaggaaaatatcattatttatgcctggtcaaatgttttttaccctacagatttgagttacagaataccactgcccagttattgtttcatataagaaatctcttagataataggattttcaatatcagtatatgttaactttatttttacttttaaggttgattgtatatcctccaccacctactaaggggggattaggagtaactaatgaagatctggagtgtttagaagaaggagagtttcttaatgatgtaatcattgatttttaccttaagtaagtacaatgataaatgatcctacatattttacagattttactgagaaacttaaaataaatgtctttatctctgaattattttaaattctgttaaaagtagcctgccaagatttcagatttggaaaatttttgcttaccaaggttttctagaattgacttattcagtttcattgctttacttactgtggatgctatatagttaagaagagttgctgcttttttgcttttttagcttttgttagtttttgatgtaaatttctttaactattgtattatggtggtgaaagaagttacttacaaattacaaatcattttgggaactaaaaaacagcagctctattgagatatctgttgtatctttttttttttgtttgagatggagtctcactcttgtcacccaggctggagtccagtggcacaatctcggctcactgcaacctctgcctcctgggttcaagctattttcctgcctcagcctcctgagtagctgggattacaggcgcccgccaccacgcccggctaatttttgtacttttagtagagatggggtttcatgttggccaggctggtcttgaactcctgacctcaggtgatctgccctccttggcctccctaagagttaactatcattttaagaatccatatcacttaatttctcccccaactttttgtatagccagagctgcaggaattggtatgaaaacatttaaaactttatgcaaaggaaatttgcttctagccgtcattttgtactgtatctctagacctagattcccaacagttgatggagatatctcctaattattttacacatctctcccaaaccaaatttattataatcttacctaagctctattgttttactaataatactagtaatctttatcccagtaactcaggtcaaaatctcacattatatttacagacactgtagatttaatctctaggaattaaatgtgggtcttttttatatcttccatgtttctttttgaacatatggaatacagttataattgttttaatattattttctgctaattctaacaactctgtcagttctgggttcaattgactgatttttctcttcattatgagtcatttctttgcacttttgcatgtctggtaattttttgattgggtgctggatatttttgtatttataaatatgcttgaattttgttttgggacacagtaaaattatttggaaaatgtttgatgcctttaagatttgttagatgaggccaataacttaatcttactactgaggaaagacctttttgagtattctacccaatgtctcaggaattacgaagtttccaatttggctgataggaacaggcaccattcttggtctctgtgagcacttggtatcattctctctgatctttttgggtagttctttccctatccctgggtactttcctcacatacattcggtgtttaatactctcctgaatacttgaagaggactttgcagctgtctggagttctctgtatagctctttcctttccagtattctgatctgcaaactctagctactccatttttaaaaaacaatcacacattttcaagcctgcataaactataaagaatagcagagttttctaatcatgaaggggttaattactaagtgattggattataagcttatatggaaggattgttttagtacagaaatggactaagaatttagagatgaatcatatcacacagttattaacatttttctagatttgtttagcagtgtcacaatttcacttttatatttgagtatatgattatttgattaatattttctaccctcactcctctggattataggctctacaggggcaggtactttatttttcccctcttgttttgtgtctctagtgtaaacatggtgtttggcacatgttaggaatttttaaaagttttttaatttttttttttttttttgagacagagtctcgctgtgtcacccaggctacagtgcagtgatgtgatctcagctcactacaacctctgcctctcgggttcaagtgattctcctgcctcagccctctgagtagctgggaccacaggtgcacaccaccacacccagctaatttttgtatttttagtagagacggggtttcaccatgttggtcagaatggtctcgatctcttgacctcgtgatctgcccgcctcggcctcccaaagtgcttggattacaggcgtgagccaccgtgcctggccacatgttaggaatttgataaatatttgttaagtaaatgaatgaataagtgggtaatttctgctttacatgatggaaggctaggtaactaaccaaactgaaagctgaaatcagaggaaactgcaagattgctttgaatcaaaatagataaaaaataaagatttccagaacacataagacaactgggggacgaccaagtaaaatctaaaaataatttacttttgtggggttactactttacaggtatcttatattggagaaggcatcagatgaacttgttgaacgaagtcacatttttagtagctttttctataaatgcttgacaagaaaggaaaataatttaacagaagataatccaaatctttcgtaagttaatcctctaatgtacttaagttttaagagaaaatgtactatttttgatgctcctagtaaagtggcttctttatagtatttcctcaagtaggcagtactaccatttgttcaggtcctgggtctgtttgccatgagagccatttctcatccttccactgttttgctgcccatgacagggaggctgacacttgcagtctgcatttccaattgcatgtccctgggggaaatcctggaagttggagggcaaggaagaaagaagctaggttatttcttccctactctctttgcattgggaaatgattctgacagtggctgtatttcctctgtgagtccacctctcacaggacagacctgctataactccagctttcatctggaggtactgcttcctctctttgccctctaccctacaggtatagcagtttcctcctctgctaatctttgctgtctcactgtccccgtttttggctttgtgtttttttgtttttctttttttgtcaatgctatagccaatttcctgcattgaattctatctgttatatagggctgtttttgttttcctggttggatccccaatgacagactatttaattaaacctatgctacattatacgaaataccctatttgtttgcacaatttagctgatttttgcccaagtatttttttggttaatactaaaactgtggagcagtggctagggataggcaaaaaggaggtatttcttagacagtagaaacttggatagttgttgcaacatgaggcatttctcccctttccccatacttaacaatttgtatgataatctatctgagtagactcatgataaagctgagttattgttattttaaaagttagtgtaaacatttctctactgctttacaatttacaactccatttattgacattatttcagtttttcctgtcatgacagtaccttttgatagggcatataaactgtatcccaatttttcatatgaggaagcagtctaatgaagattaataaattttacttaagatgaacagctagtgagtggcagaactagttggtacttaaatctttaccttttaacttctagtccaaagtttttattgtactagattgctttaaaaaatggctatgagagtttgtttcatctcgttaaaataacaggagtaataaacaagagttagaagaggattaatggataaactgcttgaatttgatatattgttggagaaagagggtaggaatagggacactaattaatatttattgagtgcctgctaggaactaagacggtgaacataaagttatttgattctacagtattattgtcattgtctttatgaattgaagcttaaggaagttatatgagtttttcaaagttggatatagctttccagtttcaaagttcaactctttctgttgttcatagtgttgtgattatataattaatggtctaaattgggatgcttgtgagaataataggaggctgtcttagtgggtacactagacaacgagtgcgtataccagggcttttctagacaaactgggatgtatgattaactccattttgagtgtctttacaggtttggaatttgtcctgatggacaagacctgcgaggatcagttaaggagaaaactgcaatttgaaaatatttctgataatcagggctaggagagggatatatggaagggggagatttattaaataaattaggtaacatttctgatgccctcctgttctgttttatgtatacagaatttaatgattggtaccatgcacttaatctcatgttttatttcaagattattcaaagtagagattgtgaattttgtatactcaccttcaaactaaggaaatgaaagtagatagattctgctgtattagtaagcttttcaaaaaacagatattgtgtacctgattattatatacataataaaaataaagttacgtgagtggcatcctctagggtaagatgcataagatactacacacacacacacatgtacacatgcacatgaatgtgtgaatactaatgcttggtctgttaagcattcacacaatttgatatatcagatcaagcattagtgtttacacaaagaatccctacaaatcagtttttaaaagtcatcagagcagcaagagatatgaattttaatggccaataaatccacatcaaaaggctctaactactagtgttgagaagctacagattccttatcatgctttatgagatcctgaaagatctggtttctttccatctccttaaactcatctcataatattgtttcctctcatttaccatacttaagttcaacctacctcatttccattttcaaatatgctgaccgctttcctattttctgcctgaaacaacttatcctggcatttaaaaaatttgtttcacagcgtgatctgtaatcattttattcgtttgtttacgtcttcattttctgtttctcatttgaagctacatgaagttagggactttatctgtcttattttccactctatcctcagtaccttgctcggtgcttggaacatattaggaactcaaaatatgagatgataacagtgcctattattgattactgagagaactgttagacatttagttgaagattttctacacaggaactgagaataggagattatgtttggccctcatattctctcctatcctccttgcctcattctatgtctaatatattctcaatcaaataaggttagcataatcaggaaatcgaccaaataccaatataaaaccagatgtctatccttaagattttcaaatagaaaacaaattaacagactatacactagttgaaagtaattgtttatactgattataatggttgggtccttttgaaatgagaaaattcaataaacgtgactttgatttttttatgtggttaatcttccacatagtgtctaattgctgtcaaatcttttagctcattctggatcctatgttactcctgatgtttacccatagggttttggctagatattattcagatgaacaagatggggcaatgatttcagtttcctatatgacttgataaaaattatataagaatgtaatggtttgccttttttttttcctgcaataagagttccatccaagggactgagccagaagtcacataccacctttatccccctgttaaatgtcattttcttccttcctaaaacctttcttttgacagtcaaacttggttttatatccttctcttttaactcccctgattaggtaaagaaaagaaactagtatttgtgtgtatgcaagccaaccctgttcaaggtggctgtctcagatggtttaataagggggtccccaacccctgggcttcagactggtaccagtctgtggcctgttaggagccaggccactcagcaggaggtgagcagcagtgagcgagcattactgcctaagctctgcctcctatcagatcagtggcagcgttagatactcacaggagcgcgaaccctgttgtgaacagtgcgtgcaagggatctaggttgcgtgctccttatgagaatctaactaatgcctgacggtctgaggaggaacagtttcatcttgaaaccatcccccctaaccttgtccctggaaaaattgtcttccacaaaaccagtccctggtgccaaaaaggttggggactgctgcattaccataattcctttgtacctcttatgacacattttagttatttgttatagttttttctgcccatattagattatgaatacttctagggcagtgtaggtgactttcattatttgtttttaggaacctaataaatatttgttgaagaaataaaaggaaagatggatgagtggtaggtacatttaacatcatcctgtagtttccttgtgtatgaaaggaagggagatgaattttattttaaagaatctgagaataaaagcctcatttttcctcctccattaagatttttaattaaattaagttaactgattaatttattttttagagatagggtcttcccttgttactgaggccagagtgcagtggtgtgatcacagcctcaaactcctgagattaagcaatcccccaagtagctgggactgattattggtgtgtgtcaccaccctggctaattttctttatatttttagtgacaggagtctcgctatgttgcccaggctagtgttgaactcctgatctcaagtgatcctcctaccttagcatcctaagtagctggaatcacaggcatgagccaccacactcagcccattgagttttaaaacctccctaatgacagatataacagttggagaattctgttaaggtttaatgacagtattttatatcatgcccagatggagctaagcaaaataagtagatttaactgtgtttatactaagttgcacagccagttttggaatctgaaaagcatttaataaattgctgcctttattctgtccatttcattattgtttatagttattaaatttaagaataaccaggggttactataaggagatatatttataatgtgttaaatatgatatatcttaaagaagatggttaaactaaatttaagatatttcaatatataaaaatggctcttgaagtccctatcttaaatgaaaaaatttttatatatcaaatctgtctttcatactctcagaatggcacagagaagacataaaagagtaagaacatggactcgtcacataaacatttttaataaagattacatctttgtacctgtaaatgagtcgtaagtatttcagattatttaagaacatattggaaagaattcagaaaaaaattttgtagtgtttttagattcataatcagtaaaaattatggccacatacatctcaggtattattttaatttttttaaataaaagtagctaaggcaatgaattccttatcttggattttggtttgacaatggttatgttgtaaaagtagtgaaaaaaaaataaagtgacaaatgaccacaagactataatgactgagacattgaatgtttttttgtttggatttaagaaaaaattttctaaataaaaaaataaaaatatttttgagtgaatcttcaaatacttaagaaaacaaactcttcaagcaccaatacaaaaaaaataatgctatgagtctatttattaaggcagatccttaataggaaacaccgattgtatgaaagtaaataaatttgaactactcagctgttaccctaaatagtgttacttatgccttggtaactctggatatttagtgttgatatgtatgctctatattataatgagatgttacagtggatgtcttcaaaattaatatgaaatttattctcactttctcagatgtatctctagaatatattatatgttgtttagactttgcatggtattaagattgtagttctttttcaacaggtctcactggtatctcgcagtcatttgttttccatggttagaagaagctgtgtatgaagattttccacaaactgtatcccagcagtcccaggctcagcagtcccaaaatgacaacaaaacaataggtgacatccataacgtagatggtgtttttaataatgatgacaataatttaatggttacagggaagaaaatgaagttaacggtagtatagttatttactatcattaaacctactttaacaggatgaataaaaaatctgaaatttttaatgatagacaaaatataattctgaagttgtactgttatatcaagttttattatggcacttaaaattactacttattgatcttatgaaatatttcaaacatacaaaaaagtataactaatatgaccaacatcaatacctgtttcacctggattaagaaattaaaacttttctgatataataataatctcctctgtgaccactcccatttctctttctttaatccagaagtaaccactaccctaaattttatgtttattccatgtattattattattattattatttccattgacattttttgcttgttttaacttaaaaaaattgacagataaaattgcatgtatttactatgtacaacatacttttttttttttttttaagagacgttgtcttggtgtagtgcagtggctcagttatagctcattgcaacctcgaactcctgggctcaagtaatcctcctgccttaccctcctgattagtcaggactacaggggtgcaccaccttacctggcttatttttaaatttttttttgtaaagataggatctcactatgttgcccaggtgggtctggaactcctggcctcaagcagtcctcacaccgcaggctcctaaagtattgggattacaggcatgagccaccacacctggctacaacatgatattttgaaatacatatacattgtagaatgacaaaatctagctaattaatagtattataccattttaaaaaatacactaggtttgctaacatgactaggaatttatgcctttgatttccagacaatgcttgaaatcccccatttttacttaatctaatttcctgtagactccattaatttggctaggtaatataggatctcttataattcttccacgagttttcttacaagccaaaatctaaagtaaataagcctactttctttgagaaaaaagtaacaaaattaaatgttttatagctgtagcctaagcagtaagctgattgaaaaatagccattagcattaatactggccaaaacccatgtggggaaaaagaaaaactgatgaagcaactgattatgtttaattatcttgaaacctcaaatgtgtacttacacaaaactatatggtcatagttagaagcaccattattaggcagattaactaccttctgcattaaatagcagacattttgattaatgagctatttttgaagattatctttttatagagaatttgcctagctaactggtatttccaatcatggctctggggtttacctgttatttgataacagccaaccattgtcagttttatctgttgattgaattttattcataacattaatcatgaaaaaaattaaatctcaagtatttttactgtgcatccagtaactgcataaaaattataattttaagcttttctaagttacctgtataaaaacatgcaataaacactcataactgcttaattatttctaactagataatgatctacgtactacttcgacactgtctttgagtgcagaggattcccaagtaagtgtgttctttacagatgggaaggaaggaaaactcatgaatataataatgttatctgtaaaatagagcatagctaggtgggctatgctggcccatcattagattgtgctgctttgtgattctttgacagtttttgtggggctggggaagagaacgagattagttattattcttatatctgtttagcttgctttaacttttaggttatttagtagtttatctgatgttcatcttggttaactacttttctaatttctaaggatcagattcacttttatttatgtcagtaactttttgaacttaggtaattaatcatcttaagcacattatatattctactttattttctttctttcttccttttttttttttttctttgtgatggggtcttgctgacacccaggctggagtgcaatggtacaatctcagctcagtgcaacctccccctcctggattcaagcgattctcctgcctcagcctctcaagtagctgggattacaggtgcccaccaccatgcctggctaatttttgtattttttttttttttttttttttagtagagatggggttttgccatgttggctagacttgtcttgaactcctcacctcaggtgatctgcctgcctgggcctcccaaagtgctgagattagaggcgtgagccaccgagcccggccagaaaattattggtaaaaatcattcaaggtagactgaaagtgaatccatgtaactccttaggctaaaatagttatcattaactcttccttatttggagctccaaacagatctgcatagcctagattcagtgttctaaattaagattgccacttaatgattttttttttttatatgtacaaatagcagcagactccctggcacaggcctatgtctttactgtcactgatacgaactgtcacttcttacggaggaaggcttcctttcctgctgtcacggcggcaaaataggagcattccttcttgcctgtagggccagatttctcaaattgagtttcttagaatattcattctaagactcagttcgtgataagcaggattccaaggtcaattaagttgggcaaactttgtatactctttctgtcttagagagccagtgtttatgttagaataataaaggcactgagaaggtctgcattaaataaatgtgcttaagtttgatctgtagtttctcaaacttatgaagaaaacaaacaacatcaacaaaacaaaattccctatcccttttcccttaatatagattaaggttctgcatcttaggcttcaaagggaagaaatgtgtctctactgacatcataaattggagaatgtatgtaaagacacgttaaattaacttgtttatctttgcttaagataataacttggaatggaagtaattaaagttccagattgctttttaggaaaagttaaaactccttaactgcttgagactgcatgtaaaagtatatagcctactgttttagcagtataataaatttgtggaaaatgaagttagctcacttttgatgatgaagataactattacttgaaattttaacttcaaagtttgaaacactttaaaggagtaactgaatagtaaattattcaaaatagctttaattgcagtcataaaaatttatgttatttcagagtaccgagtcgaatatgtcagtaccaaagaaaatgtgtaaaaggtaggtacatgctgtaataataatacagttttttgaggtatttagatatactttgtatacaagtatgtaaatcttgattttgtcctttgcttttcataggccatgtattcttatactagactccttgaaagctgcttctgtacaaaacacagttcagaatttacgagagtaagtaatgacaattttaccattccagtctgttatctaaaacctcagtaattttgaagttaccttcagaattattgaaaagactatatcaggaattatattttattatctatttcaacaatcctataaatttaatcaataataaatatcttctattctgttaatattcaagtattaatatttctaaaggattatattaaaggtaaattcagaatttgtattcataattgaacagaaagtatagttttacaaagaagcattgcattgattatcaaaagtaccactttagaaaaaaataagaactctttcacatttgtataattatgtatatgtatgtatgtgtaattttgtaatttactgtagtacttggaaaaaactaatgatgaaagttttaaaatgatttcttagtttactttgttgagttatgaaagttgagttgttgaaaaaagtctagcttttactttgaaaatcacattacatattttctttaaagtagtacttgtgagccttataaaatgtaggttgcactgctaaaattcagtgtggaaatttggcttgagacagcacatctggcaacaaatgtttttccgcctttctgaaaatgttgcatactgataaatagatttctactttagtcactcttatttgttgattatttcaggtatttagaggtagagtgggaagttaaactaaaaactcatcgtcaattcagcaaaacaaacatggtggatctatgccctaaagttcctaaacaggacaatagcagtgattgtggagtatatttattgcagtatgtggaaagcttcttcaaggtatgtgaagctataaataagtttttaattcacagttaccaccatacggtcacaagttactgggtgtaatagtccgttctcatgctgctaataaagacatacccaagactgggtaatttataaaggaaagaggtttaattgactcacagttcagcatggctggggaggtctcaggaaacttacgatcatggtggaaggggaagcaaacatatccttttttacatgatagcagcaaggagaagaatgagagctgagcgaagggggaagccccttataaaaccatcagatctcatgagaagttactatcaggagaatagcatgggggaaaaccgcccccatgattcagttacctcctaccaggtccctcccaccacagtggggattataggaactacaattcaagatgagatttgggtcggggcacagcaaaactatatcactgggcaagcaaagaggcaggcacatgttacaggtaatcaagattttttttaaagagaaagaaatagaaccacaggtgatccagatactgtaactggcagataagaactttaaaatgatttgattaataggttagagaagataaagccaaagatgaaacaaaatggatgaagacatggagtatacaaaaaaaaaatcaaatagacgttctagagctgaagatgtataatgacatatctgaaattaggaacttattggacaagtttaatagaggactagatacagtagaagataggattagtgaactccagctatagcccagagagaaaaaagaatgtaaagaagagaacagagcttaagagacaaatataaaacagtataatttactgtttgaaaggtataatttacatgttactggagtcccagcaagattggagagaaagagaatagggcagagacagtattttaaataaaattttctaaaatgaaaagatctgtttattcaagaagctcagaaaactatagctggagaagtacaatgacaaacataggtgttattttctagctcacagagactttgtaggaactgtagcagtattaaagatgaaattttaaatagcaaggaatcactctttgctttttgaactgtcatctcattacttcagtcattgccactattatttacaaagatgggtctagtagcagaatgtttttgaccagaagtcggcttggagaatgcttaacggtactttgaaagcatgagagttatagtatgcagctacaactttttgatgtctttaatatgagagaggaaggataatatatagtaaaatacagtacacattttggaaatcattaaatatctattatgttgggttttttctcccttttttattccacactagaacttcatcatagggtgtcaggttctgcccctctcataccctttccagatggatttgattttgtgaatatactaaaaatgcttaattgtatgctattggtgaattgtattatgtgaattatatcttaatataattgttattttaaaaaagttagcaatttgtcatttcttataaaaatgaaattaaaacaaatttgaaattatgctgctaaagtgattacactctttttttcctctcattaggatcctattgttaactttgaacttccaattcatttggagaagtggtttcctcgtcatgtaataaagaccaaacgggaagatattcgagagctcatcttgaaacttcatttacagcaacagaagggcagcagtagctagttaatctgtacaaacatgacacagatgttctctaagattactggaaagcctcttaccagcatttgtgttagccagctcacagagaagaaaataacttgcagtagttttataataagtcattggaacattatttaaaatatgtaggacacattattagaattgttgggatctcatagatggaatgggaatgggggtgatatagataaacttactagatataaattaaaattttataaatatttcatatttttctgagtaaatatgattggattatgcaacagcatatgtaatatgggaatgttttgtagataataaaacttacatgatctgtacttccacgtgactgggtgctgaggggagttaaagcctccctggtgccagccccagtgcttgtcaaatttgctgacaggtcacatcatattgtaattctattctttgcagctcaagcatgcagtatgaatactgtgtattttttaaaaaaataatttagtatcaaggcttcagaaaatgccatttacggcatcccttctgtatgtaacaaaaagacattcataatgttaggaagatgataaaaattcgctcttttaaagtgcagcttattattctcaattgctaaatacgattactctgcttttttttttttcatttcttttgatgtcatatgtgagtatcttataatttagttcatttgttcagggtaaaatttgaaacaaaaaattttacctgtgcaaaatagttttttaaaaattatacatgtagctcaacttgaggtactgctatataaatattcactcacattatcacggaatttatgtatagtttctctaatatagaagataaaattggtgtcctcataactttaacaaagaaaaccctcagtcctatttattaatgggtagaattaaatatataattttatagctcagtttacccagtattcatctgcaaagccagattgctctcattgcttttatatttttaaattgtagcttttagagacctatgatcctcatggaacttaattttttattaaatattcaggtaacagttctgaattcatgtgataatggtggcattatatatgattaaacacttcagaactttctaatgttatcaggagtattttgagggagatatgattatattgtattttctcagataagaaaaatgttttttaacaatattattttaatctgttttaagcatctcttagatttacattgtaactacataaagcagtgaagcaaaggcaaattaagataaagctagaaagtctgaacattttatttcaaaatcatacgaatcggggtcagttaagcctcagtattcttagcttttgttgattttggcactatctttatattattaaatatatttgttgtttggatatttcatataaagatggctataattacatatttcattcccaatttgtgtgtgttggggggtacttttaaaggtgactattgttttgtacatctaattttgggaaagcaagtctataagacatcttgtgatttcttaatgtttttgtttgtatgtttttcaaagatatcactgtcctttatcatgttttgaagattgtttaaaattcattttcctaaattaatgtgcaagtaatgttttgaggatatcagtgttttatattaaacatatttccaattcattaaattgaggtgtaatttttttccttaagaaacatgagctactgttagaaataaatttccagttgtatgctgctctgtgtatatcatga

SEQ ID NO: 88 - DNA, 4794 bp, Homo sapiens
cctttcccctccccctccctctccaagccggaggggtcctgaggtgacagcgcctgcaactgaaatttcagcagcgggagaagatggacaagagaaagctcgggcgacggccatcttcatccgaaatcatcacagaaggaaaaaggaaaaagtcatcttctgatttatcggagataagaaagatgttaaatgcaaaaccagaggatgtccatgttcaatcaccactgtccaaattcagaagctcagaacgctggactctccctttgcagtgggaaagaagcctaaggaataaagtcatctctctagaccataaaaataaaaaacatatccgagggtgtcctgttacttccaagtcatcaccagaaaggatacccagagttatattgacgaatgtcctgggaacggagttaggaagaaaatacataaggaccccacctgtaactgagggaagtttgagtgatacagacaacttgcaatcagagcaactttcttcatcatctgatggcagcctagaatcttatcaaaatctaaaccctcacaagagctgttatttatctgaaaggggctcacaacgaagtaagacagtagatgacaattctgcaaagcagactgcgcacaataaagaaaaacgaagaaaggatgatggcatttctcttttaatatctgatactcagcctgaagaccttaacagtggaagtagaggttgtgatcatctcgaacaggaaagcagaaacaaggatgttaaatattctgattcaaaagtggaactcactctgatttccaggaagacaaagagaaggcttagaaataatttacctgattctcaatattgtacttctttggataagtcaacagaacagacaaaaaaacaagaagatgactcaacaatatccactgagtttgaaaagccaagtgaaaactatcatcaggatccaaaactgcctgaagaaattacaactaaacctacaaaaagtgattttactaaactatcctcacttaacagtcaggagttgactttgagtaatgccaccaaaagtgcctctgccggttcaaccactgaaaccgttgagaactctaattccattgatattgtggggatttcttccctggttgagaaggatgagaatgagttgaataccatagaaaagcctattctaagaggacataatgaagggaaccaatcactgatctcagctgaaccaattgttgtttccagtgatgaagaaggacctgttgaacataaaagttcagaaattcttaagttacaatctaagcaagaccgtgagacaactaatgaaaatgagagtacttctgaatcagcattgttagaactaccattgattacatgtgaatctgtacagatgtcatctgaattatgcccatataatcctgtcatggagaacatttccagtattatgcctagtaatgagatggatctacaactggattttatatttacttctgtttatattggtaaaataaaaggagcttctaaaggttgtgttacaatcacaaaaaaatatattaagatcccatttcaagtgtccctgaatgagatttcattgctagtggataccacacatttaaagcggtttgggttatggaaaagtaaggatgataatcacagtaaaaggagtcatgctattcttttcttctgggtctcttcagattatcttcaagagattcagacccaattagaacactctgtattaagccagcattcaaaatctagtgaattcattttccttgaactacacaatcctgtttcacaaagagaagaattgaagctgaaagatattatgacggaaataagtataatcagtggagaattagagctttcttacccgttgtcttgggttcaggcatttcctttgtttcagaacctctcttcaaaagaaagttcttttattcattattactgtgtttcaacttgttctttccctgctggtgttgctgttgctgaagaaatgaagctgaaatcagtatctcagccctcaaacacagatgcggccaagcctacttacaccttcctgcagaagcaaagtagcggttgctactccctttctattacatctaatccagatgaagaatggcgagaagtcaggcacactggacttgttcagaagttgattgtatatcctccaccacctactaaggggggattaggagtaactaatgaagatctggagtgtttagaagaaggagagtttcttaatgatgtaatcattgatttttaccttaagtatcttatattggagaaggcatcagatgaacttgttgaacgaagtcacatttttagtagctttttctataaatgcttgacaagaaaggaaaataatttaacagaagataatccaaatctttcaatggcacagagaagacataaaagagtaagaacatggactcgtcacataaacatttttaataaagattacatctttgtacctgtaaatgagtcgtctcactggtatctcgcagtcatttgttttccatggttagaagaagctgtgtatgaagattttccacaaactgtatcccagcagtcccaggctcagcagtcccaaaatgacaacaaaacaatagataatgatctacgtactacttcgacactgtctttgagtgcagaggattcccaaagtaccgagtcgaatatgtcagtaccaaagaaaatgtgtaaaaggccatgtattcttatactagactccttgaaagctgcttctgtacaaaacacagttcagaatttacgagagtatttagaggtagagtgggaagttaaactaaaaactcatcgtcaattcagcaaaacaaacatggtggatctatgccctaaagttcctaaacaggacaatagcagtgattgtggagtatatttattgcagtatgtggaaagcttcttcaaggatcctattgttaactttgaacttccaattcatttggagaagtggtttcctcgtcatgtaataaagaccaaacgggaagatattcgagagctcatcttgaaacttcatttacagcaacagaagggcagcagtagctagttaatctgtacaaacatgacacagatgttctctaagattactggaaagcctcttaccagcatttgtgttagccagctcacagagaagaaaataacttgcagtagttttataataagtcattggaacattatttaaaatatgtaggacacattattagaattgttgggatctcatagatggaatgggaatgggggtgatatagataaacttactagatataaattaaaattttataaatatttcatatttttctgagtaaatatgattggattatgcaacagcatatgtaatatgggaatgttttgtagataataaaacttacatgatctgtacttccacgtgactgggtgctgaggggagttaaagcctccctggtgccagccccagtgcttgtcaaatttgctgacaggtcacatcatattgtaattctattctttgcagctcaagcatgcagtatgaatactgtgtattttttaaaaaaataatttagtatcaaggcttcagaaaatgccatttacggcatcccttctgtatgtaacaaaaagacattcataatgttaggaagatgataaaaattcgctcttttaaagtgcagcttattattctcaattgctaaatacgattactctgcttttttttttttcatttcttttgatgtcatatgtgagtatcttataatttagttcatttgttcagggtaaaatttgaaacaaaaaattttacctgtgcaaaatagttttttaaaaattatacatgtagctcaacttgaggtactgctatataaatattcactcacattatcacggaatttatgtatagtttctctaatatagaagataaaattggtgtcctcataactttaacaaagaaaaccctcagtcctatttattaatgggtagaattaaatatataattttatagctcagtttacccagtattcatctgcaaagccagattgctctcattgcttttatatttttaaattgtagcttttagagacctatgatcctcatggaacttaattttttattaaatattcaggtaacagttctgaattcatgtgataatggtggcattatatatgattaaacacttcagaactttctaatgttatcaggagtattttgagggagatatgattatattgtattttctcagataagaaaaatgttttttaacaatattattttaatctgttttaagcatctcttagatttacattgtaactacataaagcagtgaagcaaaggcaaattaagataaagctagaaagtctgaacattttatttcaaaatcatacgaatcggggtcagttaagcctcagtattcttagcttttgttgattttggcactatctttatattattaaatatatttgttgtttggatatttcatataaagatggctataattacatatttcattcccaatttgtgtgtgttggggggtacttttaaaggtgactattgttttgtacatctaattttgggaaagcaagtctataagacatcttgtgatttcttaatgtttttgtttgtatgtttttcaaagatatcactgtcctttatcatgttttgaagattgtttaaaattcattttcctaaattaatgtgcaagtaatgttttgaggatatcagtgttttatattaaacatatttccaattcattaaattgaggtgtaatttttttccttaagaaacatgagctactgttagaaataaatttccagttgtatgctgctctgtgtatatcatga

SEQ ID NO: 89 - protein, 974 aa, Homo sapiens
MDKRKLGRRPSSSEIITEGKRKKSSSDLSEIRKMLNAKPEDVHVQSPLSKFRSSWTLPLQWERSLRNKVISLDHKNKKHIRGCPVTSKSSPERIPRVILTNVLGTELGRKYIRTPPVTEGSLSDTDNLQSEQLSSSSDGSLESYQNLNPHKSCYLSGSQRSKTVDDNSAKQTAHNKEKRRKDDGISLLISDTQPEDLNSGSRGCDHLEQESRNKDVKYSDSKVELTLISRKTKRRLRNNLPDSQYCTSLDKSTEQTKKQEDDSTISTEFEKPSENYHQDPKLPEEITTKPTKSDFTKLSSLNSQELTLSNATKSASAGSTTETVENSNSIDIVGISSLVEKDENELNTIEKPILRGHNEGNQSLISAEPIVVSSDEEGPVEHKSSEILKLQSKQDRETTNENESTSESALLELPLITCESVQMSSELCPYNPVMENISSIMPSNEMDLQLDFIFTSVYIGKIKGASKGCVTITKKYIKIPFQVSLNEISLLVDTTHLKRFGLWKSKDDNHSKRSHAILFFWVSSDYLQEIQTQLEHSVLSQHSKSSEFIFLELHNPVSQREELKLKDIMTEISIISGELELSYPLSWVQAFPLFQNLSSKESSFIHYYCVSTCSFPAGVAVAEEMKLKSVSQPSNTDAAKPTYTFLQKQSSGCLSITSNPDEEWREVRHTGLVQKLIVYPPPPTKGGLGVTNEDLECLEEGEFLNDVIIDFYLKYLIKASDELVERSHIFSSFFYKCLTRKENNLTEDNPNLSMAQRRHKRVRTWTRHINIFNKDYIFVPVNESSHWYLAVICFPWLEEAVYEDFPQTVSQQSQAQQSQNDNKTIDNDLRTTSTLSLSAEDSQSTESNMSVPKKMCKRPCILILDSLKAASVQNTVQNLREYLEVEWEVKLKTQFSKTNMVDLCPKVPKQDNSSDCGVYLLQYVESFFKDPIVNFELPIHLEKWFPRHVIKTKREDIRELILKLHLQQQKGSSS

SEQ ID NO: 90 - DNA, 4992 bp, Homo sapiens
cctttcccctccccctccctctccaagccggaggggtcctgaggtgacagcgcctgcaactgaaatttcagcagcgggagaagatggacaagagaaagctcgggcgacggccatcttcatccgaaatcatcacagaaggaaaaaggaaaaagtcatcttctgatttatcggagataagaaagatgttaaatgcaaaaccagaggatgtccatgttcaatcaccactgtccaaattcagaagctcagaacgctggactctccctttgcagtgggaaagaagcctaaggaataaagtcatctctctagaccataaaaataaaaaacatatccgagggtgtcctgttacttccaagtcatcaccagaaaggcaactcaaagttatgttgacgaatgtcctatggacggatttaggacgaaaattcagaaagaccctacctagaaacgatgctaatttatgtgatgccaacaaggtgcaatcagactcattgccttcgacatctgttgacagcctagagacatgtcaaaaattagaacctcttcgccaaagccttaatttatctgaaaggatacccagagttatattgacgaatgtcctgggaacggagttaggaagaaaatacataaggaccccacctgtaactgagggaagtttgagtgatacagacaacttgcaatcagagcaactttcttcatcatctgatggcagcctagaatcttatcaaaatctaaaccctcacaagagctgttatttatctgaaaggggctcacaacgaagtaagacagtagatgacaattctgcaaagcagactgcgcacaataaagaaaaacgaagaaaggatgatggcatttctcttttaatatctgatactcagcctgaagaccttaacagtggaagtagaggttgtgatcatctcgaacaggaaagcagaaacaaggatgttaaatattctgattcaaaagtggaactcactctgatttccaggaagacaaagagaaggcttagaaataatttacctgattctcaatattgtacttctttggataagtcaacagaacagacaaaaaaacaagaagatgactcaacaatatccactgagtttgaaaagccaagtgaaaactatcatcaggatccaaaactgcctgaagaaattacaactaaacctacaaaaagtgattttactaaactatcctcacttaacagtcaggagttgactttgagtaatgccaccaaaagtgcctctgccggttcaaccactgaaaccgttgagaactctaattccattgatattgtggggatttcttccctggttgagaaggatgagaatgagttgaataccatagaaaagcctattctaagaggacataatgaagggaaccaatcactgatctcagctgaaccaattgttgtttccagtgatgaagaaggacctgttgaacataaaagttcagaaattcttaagttacaatctaagcaagaccgtgagacaactaatgaaaatgagagtacttctgaatcagcattgttagaactaccattgattacatgtgaatctgtacagatgtcatctgaattatgcccatataatcctgtcatggagaacatttccagtattatgcctagtaatgagatggatctacaactggattttatatttacttctgtttatattggtaaaataaaaggagcttctaaaggttgtgttacaatcacaaaaaaatatattaagatcccatttcaagtgtccctgaatgagatttcattgctagtggataccacacatttaaagcggtttgggttatggaaaagtaaggatgataatcacagtaaaaggagtcatgctattcttttcttctgggtctcttcagattatcttcaagagattcagacccaattagaacactctgtattaagccagcattcaaaatctagtgaattcattttccttgaactacacaatcctgtttcacaaagagaagaattgaagctgaaagatattatgacggaaataagtataatcagtggagaattagagctttcttacccgttgtcttgggttcaggcatttcctttgtttcagaacctctcttcaaaagaaagttcttttattcattattactgtgtttcaacttgttctttccctgctggtgttgctgttgctgaagaaatgaagctgaaatcagtatctcagccctcaaacacagatgcggccaagcctacttacaccttcctgcagaagcaaagtagcggttgctactccctttctattacatctaatccagatgaagaatggcgagaagtcaggcacactggacttgttcagaagttgattgtatatcctccaccacctactaaggggggattaggagtaactaatgaagatctggagtgtttagaagaaggagagtttcttaatgatgtaatcattgatttttaccttaagtatcttatattggagaaggcatcagatgaacttgttgaacgaagtcacatttttagtagctttttctataaatgcttgacaagaaaggaaaataatttaacagaagataatccaaatctttcaatggcacagagaagacataaaagagtaagaacatggactcgtcacataaacatttttaataaagattacatctttgtacctgtaaatgagtcgtctcactggtatctcgcagtcatttgttttccatggttagaagaagctgtgtatgaagattttccacaaactgtatcccagcagtcccaggctcagcagtcccaaaatgacaacaaaacaatagataatgatctacgtactacttcgacactgtctttgagtgcagaggattcccaaagtaccgagtcgaatatgtcagtaccaaagaaaatgtgtaaaaggccatgtattcttatactagactccttgaaagctgcttctgtacaaaacacagttcagaatttacgagagtatttagaggtagagtgggaagttaaactaaaaactcatcgtcaattcagcaaaacaaacatggtggatctatgccctaaagttcctaaacaggacaatagcagtgattgtggagtatatttattgcagtatgtggaaagcttcttcaaggatcctattgttaactttgaacttccaattcatttggagaagtggtttcctcgtcatgtaataaagaccaaacgggaagatattcgagagctcatcttgaaacttcatttacagcaacagaagggcagcagtagctagttaatctgtacaaacatgacacagatgttctctaagattactggaaagcctcttaccagcatttgtgttagccagctcacagagaagaaaataacttgcagtagttttataataagtcattggaacattatttaaaatatgtaggacacattattagaattgttgggatctcatagatggaatgggaatgggggtgatatagataaacttactagatataaattaaaattttataaatatttcatatttttctgagtaaatatgattggattatgcaacagcatatgtaatatgggaatgttttgtagataataaaacttacatgatctgtacttccacgtgactgggtgctgaggggagttaaagcctccctggtgccagccccagtgcttgtcaaatttgctgacaggtcacatcatattgtaattctattctttgcagctcaagcatgcagtatgaatactgtgtattttttaaaaaaataatttagtatcaaggcttcagaaaatgccatttacggcatcccttctgtatgtaacaaaaagacattcataatgttaggaagatgataaaaattcgctcttttaaagtgcagcttattattctcaattgctaaatacgattactctgcttttttttttttcatttcttttgatgtcatatgtgagtatcttataatttagttcatttgttcagggtaaaatttgaaacaaaaaattttacctgtgcaaaatagttttttaaaaattatacatgtagctcaacttgaggtactgctatataaatattcactcacattatcacggaatttatgtatagtttctctaatatagaagataaaattggtgtcctcataactttaacaaagaaaaccctcagtcctatttattaatgggtagaattaaatatataattttatagctcagtttacccagtattcatctgcaaagccagattgctctcattgcttttatatttttaaattgtagcttttagagacctatgatcctcatggaacttaattttttattaaatattcaggtaacagttctgaattcatgtgataatggtggcattatatatgattaaacacttcagaactttctaatgttatcaggagtattttgagggagatatgattatattgtattttctcagataagaaaaatgttttttaacaatattattttaatctgttttaagcatctcttagatttacattgtaactacataaagcagtgaagcaaaggcaaattaagataaagctagaaagtctgaacattttatttcaaaatcatacgaatcggggtcagttaagcctcagtattcttagcttttgttgattttggcactatctttatattattaaatatatttgttgtttggatatttcatataaagatggctataattacatatttcattcccaatttgtgtgtgttggggggtacttttaaaggtgactattgttttgtacatctaattttgggaaagcaagtctataagacatcttgtgatttcttaatgtttttgtttgtatgtttttcaaagatatcactgtcctttatcatgttttgaagattgtttaaaattcattttcctaaattaatgtgcaagtaatgttttgaggatatcagtgttttatattaaacatatttccaattcattaaattgaggtgtaatttttttccttaagaaacatgagctactgttagaaataaatttccagttgtatgctgctctgtgtatatcatga

SEQ ID NO: 91 - protein, 1038 aa, Homo sapiens
MDKRKLGRRPSSSEIITEGKRKKSSSDLSEIRKMLNAKPEDVHVQSPLSKFRSSWTLPLQWERSLRNKVISLDHKNKKHIRGCPVTSKSSPERQLKVMLTNVLWTDLGRKFRKTLPRNDANLCDANKVQSDSLPSTSVDSLETCQKLEPLRQSLNLSIPRVILTNVLGTELGRKYIRTPPVTEGSLSDTDNLQSEQLSSSSDGSLESYQNLNPHKSCYLSGSQRSKTVDDNSAKQTAHNKEKRRKDDGISLLISDTQPEDLNSGSRGCDHLEQESRNKDVKYSDSKVELTLISRKTKRRLRNNLPDSQYCTSLDKSTEQTKKQEDDSTISTEFEKPSENYHQDPKLPEEITTKPTKSDFTKLSSLNSQELTLSNATKSASAGSTTETVENSNSIDIVGISSLVEKDENELNTIEKPILRGHNEGNQSLISAEPIVVSSDEEGPVEHKSSEILKLQSKQDRETTNENESTSESALLELPLITCESVQMSSELCPYNPVMENISSIMPSNEMDLQLDFIFTSVYIGKIKGASKGCVTITKKYIKIPFQVSLNEISLLVDTTHLKRFGLWKSKDDNHSKRSHAILFFWVSSDYLQEIQTQLEHSVLSQHSKSSEFIFLELHNPVSQREELKLKDIMTEISIISGELELSYPLSWVQAFPLFQNLSSKESSFIHYYCVSTCSFPAGVAVAEEMKLKSVSQPSNTDAAKPTYTFLQKQSSGCLSITSNPDEEWREVRHTGLVQKLIVYPPPPTKGGLGVTNEDLECLEEGEFLNDVIIDFYLKYLIKASDELVERSHIFSSFFYKCLTRKENNLTEDNPNLSMAQRRHKRVRTWTRHINIFNKDYIFVPVNESSHWYLAVICFPWLEEAVYEDFPQTVSQQSQAQQSQNDNKTIDNDLRTTSTLSLSAEDSQSTESNMSVPKKMCKRPCILILDSLKAASVQNTVQNLREYLEVEWEVKLKTQFSKTNMVDLCPKVPKQDNSSDCGVYLLQYVESFFKDPIVNFELPIHLEKWFPRHVIKTKREDIRELILKLHLQQQKGSSS

SEQ ID NO: 92 - DNA, 3354 bp, Homo sapiens
tgcccatattagattatgaatacttctagggcagtgtaggtgactttcattatttgtttttaggaacctaataaatatttgttgaagaaataaaaggaaagatggatgagtggtaggtacatttaacatcatcctgtagtttccttgtgtatgaaaggaagggagatgaattttattttaaagaatctgagaataaaagcctcatttttcctcctccattaagatttttaattaaattaagttaactgattaatttattttttagagatagggtcttcccttgttactgaggccagagtgcagtggtgtgatcacagcctcaaactcctgagattaagcaatcccccaagtagctgggactgattattggtgtgtgtcaccaccctggctaattttctttatatttttagtgacaggagtctcgctatgttgcccaggctagtgttgaactcctgatctcaagtgatcctcctaccttagcatcctaagtagctggaatcacaggcatgagccaccacactcagcccattgagttttaaaacctccctaatgacagatataacagttggagaattctgttaaggtttaatgacagtattttatatcatgcccagatggagctaagcaaaataagtagatttaactgtgtttatactaagttgcacagccagttttggaatctgaaaagcatttaataaattgctgcctttattctgtccatttcattattgtttatagttattaaatttaagaataaccaggggttactataaggagatatatttataatgtgttaaatatgatatatcttaaagaagatggttaaactaaatttaagatatttcaatatataaaaatggctcttgaagtccctatcttaaatgaaaaaatttttatatatcaaatctgtctttcatactctcagaatggcacagagaagacataaaagagtaagaacatggactcgtcacataaacatttttaataaagattacatctttgtacctgtaaatgagtcgtctcactggtatctcgcagtcatttgttttccatggttagaagaagctgtgtatgaagattttccacaaactgtatcccagcagtcccaggctcagcagtcccaaaatgacaacaaaacaatagataatgatctacgtactacttcgacactgtctttgagtgcagaggattcccaaagtaccgagtcgaatatgtcagtaccaaagaaaatgtgtaaaaggccatgtattcttatactagactccttgaaagctgcttctgtacaaaacacagttcagaatttacgagagtatttagaggtagagtgggaagttaaactaaaaactcatcgtcaattcagcaaaacaaacatggtggatctatgccctaaagttcctaaacaggacaatagcagtgattgtggagtatatttattgcagtatgtggaaagcttcttcaaggatcctattgttaactttgaacttccaattcatttggagaagtggtttcctcgtcatgtaataaagaccaaacgggaagatattcgagagctcatcttgaaacttcatttacagcaacagaagggcagcagtagctagttaatctgtacaaacatgacacagatgttctctaagattactggaaagcctcttaccagcatttgtgttagccagctcacagagaagaaaataacttgcagtagttttataataagtcattggaacattatttaaaatatgtaggacacattattagaattgttgggatctcatagatggaatgggaatgggggtgatatagataaacttactagatataaattaaaattttataaatatttcatatttttctgagtaaatatgattggattatgcaacagcatatgtaatatgggaatgttttgtagataataaaacttacatgatctgtacttccacgtgactgggtgctgaggggagttaaagcctccctggtgccagccccagtgcttgtcaaatttgctgacaggtcacatcatattgtaattctattctttgcagctcaagcatgcagtatgaatactgtgtattttttaaaaaaataatttagtatcaaggcttcagaaaatgccatttacggcatcccttctgtatgtaacaaaaagacattcataatgttaggaagatgataaaaattcgctcttttaaagtgcagcttattattctcaattgctaaatacgattactctgcttttttttttttcatttcttttgatgtcatatgtgagtatcttataatttagttcatttgttcagggtaaaatttgaaacaaaaaattttacctgtgcaaaatagttttttaaaaattatacatgtagctcaacttgaggtactgctatataaatattcactcacattatcacggaatttatgtatagtttctctaatatagaagataaaattggtgtcctcataactttaacaaagaaaaccctcagtcctatttattaatgggtagaattaaatatataattttatagctcagtttacccagtattcatctgcaaagccagattgctctcattgcttttatatttttaaattgtagcttttagagacctatgatcctcatggaacttaattttttattaaatattcaggtaacagttctgaattcatgtgataatggtggcattatatatgattaaacacttcagaactttctaatgttatcaggagtattttgagggagatatgattatattgtattttctcagataagaaaaatgttttttaacaatattattttaatctgttttaagcatctcttagatttacattgtaactacataaagcagtgaagcaaaggcaaattaagataaagctagaaagtctgaacattttatttcaaaatcatacgaatcggggtcagttaagcctcagtattcttagcttttgttgattttggcactatctttatattattaaatatatttgttgtttggatatttcatataaagatggctataattacatatttcattcccaatttgtgtgtgttggggggtacttttaaaggtgactattgttttgtacatctaattttgggaaagcaagtctataagacatcttgtgatttcttaatgtttttgtttgtatgtttttcaaagatatcactgtcctttatcatgttttgaagattgtttaaaattcattttcctaaattaatgtgcaagtaatgttttgaggatatcagtgttttatattaaacatatttccaattcattaaattgaggtgtaatttttttccttaagaaacatgagctactgttagaaataaatttccagttgtatgctgctctgtgtatatcatga

SEQ ID NO: 93 - protein, 236 aa, Homo sapiens
MKKFLYIKSVFHTLRMAQRRHKRVRTWTRHINIFNKDYIFVPVNESSHWYLAVICFPWLEEAVYEDFPQTVSQQSQAQQSQNDNKTIDNDLRTTSTLSLSAEDSQSTESNMSVPKKMCKRPCILILDSLKAASVQNTVQNLREYLEVEWEVKLKTQFSKTNMVDLCPKVPKQDNSSDCGVYLLQYVESFFKDPIVNFELPIHLEKWFPRHVIKTKREDIRELILKLHLQQQKGSSS

SEQ ID NO: 94 - DNA, 4304 bp, Homo sapiens
ctccccctccctctccaagccggaggggtcctgaggtgacagcgcctgcaactgaaatttcagcagcgggagaagatggacaagagaaagctcgggcgacggccatcttcatccgataagaaagatgttaaatgcaaaaccagaggatgtccatgttcaatcaccactgtccaaattcagaagctcagaacgctggactctccctttgcaggtgtgggaaagaagcctaaggaataaagtcatctctctagaccataaaaataaaaaacatatccgagggtgtcctgttacttccaagtcatcaccagaaaggcaactcaaagttatgttgacgaatgtcctatggacggatttaggacgaaaattcagaaagaccctacctagaaacgatgctaatttatgtgatgccaacaaggtgcaatcagactcattgccttcgacatctgttgacagcctagagacatgtcaaaaattagaacctcttcgccaaagccttaatttatctgaaaggggctcacaacgaagtaagacagtagatgacaattctgcaaagcagactgcgcacaataaagaaaaacgaagaaaggatgatggcatttctcttttaatatctgatactcagcctgaagaccttaacagtggaagtagaggttgtgatcatctcgaacaggaaagcagaaacaaggatgttaaatattctgattcaaaagtggaactcactctgatttccaggaagacaaagagaaggcttagaaataatttacctgattctcaatattgtacttctttggataagtcaacagaacagacaaaaaaacaagaagatgactcaacaatatccactgagtttgaaaagccaagtgaaaactatcatcaggatccaaaactgcctgaagaaattacaactaaacctacaaaaagtgattttactaaactatcctcacttaacagtcaggagttgactttgagtaatgccaccaaaagtgcctctgccggttcaaccactgaaaccgttgagaactctaattccattgatattgtggggatttcttccctggttgagaaggatgagaatgagttgaataccatagaaaagcctattctaagaggacataatgaagggaaccaatcactgatctcagctgaaccaattgttgtttccagtgatgaagaaggacctgttgaacataaaagttcagaaattcttaagttacaatctaagcaagaccgtgagacaactaatgaaaatgagagtacttctgaatcagcattgttagaactaccattgattacatgtgaatctgtacagatgtcatctgaattatgcccatataatcctgtcatggagaacatttccagtattatgcctagtaatgagatggatctacaactggattttatatttacttctgtttatattggtaaaataaaaggagcttctaaaggttgtgttacaatcacaaaaaaatatattaagatcccatttcaagtgtccctgaatgagatttcattgctagtggataccacacatttaaagcggtttgggttatggaaaagtaaggatgataatcacagtaaaaggagtcatgctattcttttcttctgggtctcttcagattatcttcaagagattcagacccaattagaacactctgtattaagccagcattcaaaatctagtgaattcattttccttgaactacacaatcctgtttcacaaagagaagaattgaagctgaaagatattatgacggaaataagtataatcagtggagaattagagctttcttacccgttgtcttgggttcaggcatttcctttgtttcagaacctctcttcaaaagaaagttcttttattcattattactgtgtttcaacttgttctttccctgctggtgttgctgttgctgaagaaatgaagctgaaatcagtatctcagccctcaaacacagatgcggccaagcctacttacaccttcctgcagaagcaaagtagcggttgctactccctttctattacatctaatccagatgaagaatggcgagaagtcaggcacactggacttgttcagaagttgattgtatatcctccaccacctactaaggggggattaggagtaactaatgaagatctggagtgtttagaagaaggagagtttcttaatgatgtaatcattgatttttaccttaagccatgtattcttatactagactccttgaaagctgcttctgtacaaaacacagttcagaatttacgagagtatttagaggtagagtgggaagttaaactaaaaactcatcgtcaattcagcaaaacaaacatggtggatctatgccctaaagttcctaaacaggacaatagcagtgattgtggagtatatttattgcagtatgtggaaagcttcttcaaggatcctattgttaactttgaacttccaattcatttggagaagtggtttcctcgtcatgtaataaagaccaaacgggaagatattcgagagctcatcttgaaacttcatttacagcaacagaagggcagcagtagctagttaatctgtacaaacatgacacagatgttctctaagattactggaaagcctcttaccagcatttgtgttagccagctcacagagaagaaaataacttgcagtagttttataataagtcattggaacattatttaaaatatgtaggacacattattagaattgttgggatctcatagatggaatgggaatgggggtgatatagataaacttactagatataaattaaaattttataaatatttcatatttttctgagtaaatatgattggattatgcaacagcatatgtaatatgggaatgttttgtagataataaaacttacatgatctgtacttccacgtgactgggtgctgaggggagttaaagcctccctggtgccagccccagtgcttgtcaaatttgctgacaggtcacatcatattgtaattctattctttgcagctcaagcatgcagtatgaatactgtgtattttttaaaaaaataatttagtatcaaggcttcagaaaatgccatttacggcatcccttctgtatgtaacaaaaagacattcataatgttaggaagatgataaaaattcgctcttttaaagtgcagcttattattctcaattgctaaatacgattactctgcttttttttttttcatttcttttgatgtcatatgtgagtatcttataatttagttcatttgttcagggtaaaatttgaaacaaaaaattttacctgtgcaaaatagttttttaaaaattatacatgtagctcaacttgaggtactgctatataaatattcactcacattatcacggaatttatgtatagtttctctaatatagaagataaaattggtgtcctcataactttaacaaagaaaaccctcagtcctatttattaatgggtagaattaaatatataattttatagctcagtttacccagtattcatctgcaaagccagattgctctcattgcttttatatttttaaattgtagcttttagagacctatgatcctcatggaacttaattttttattaaatattcaggtaacagttctgaattcatgtgataatggtggcattatatatgattaaacacttcagaactttctaatgttatcaggagtattttgagggagatatgattatattgtattttctcagataagaaaaatgttttttaacaatattattttaatctgttttaagcatctcttagatttacattgtaactacataaagcagtgaagcaaaggcaaattaagataaagctagaaagtctgaacattttatttcaaaatcatacgaatcggggtcagttaagcctcagtattcttagcttttgttgattttggcactatctttatattattaaatatatttgttgtttggatatttcatataaagatggctataattacatatttcattcccaatttgtgtgtgttggggggtacttttaaaggtgactattgttttgtacatctaattttgggaaagcaagtctataagacatcttgtgatttcttaatgtttttgtttgtatgtttttcaaagatatcactgtcctttatcatgttttgaagattgtttaaaattcattttcctaaattaatgtgcaagtaatgttttgaggatatcagtgttttatattaaacatatttccaattcattaaattgaggtgtaatttttttccttaagaaacatgagctactgttagaaataaatttccagttgtatgctgctctgtgtatatcatga

SEQ ID NO: 95 - protein, 799 aa, Homo sapiens
MLNAKPEDVHVQSPLSKFRSSWTLPLQVWERSLRNKVISLDHKNKKHIRGCPVTSKSSPERQLKVMLTNVLWTDLGRKFRKTLPRNDANLCDANKVQSDSLPSTSVDSLETCQKLEPLRQSLNLSGSQRSKTVDDNSAKQTAHNKEKRRKDDGISLLISDTQPEDLNSGSRGCDHLEQESRNKDVKYSDSKVELTLISRKTKRRLRNNLPDSQYCTSLDKSTEQTKKQEDDSTISTEFEKPSENYHQDPKLPEEITTKPTKSDFTKLSSLNSQELTLSNATKSASAGSTTETVENSNSIDIVGISSLVEKDENELNTIEKPILRGHNEGNQSLISAEPIVVSSDEEGPVEHKSSEILKLQSKQDRETTNENESTSESALLELPLITCESVQMSSELCPYNPVMENISSIMPSNEMDLQLDFIFTSVYIGKIKGASKGCVTITKKYIKIPFQVSLNEISLLVDTTHLKRFGLWKSKDDNHSKRSHAILFFWVSSDYLQEIQTQLEHSVLSQHSKSSEFIFLELHNPVSQREELKLKDIMTEISIISGELELSYPLSWVQAFPLFQNLSSKESSFIHYYCVSTCSFPAGVAVAEEMKLKSVSQPSNTDAAKPTYTFLQKQSSGCLSITSNPDEEWREVRHTGLVQKLIVYPPPPTKGGLGVTNEDLECLEEGEFLNDVIIDFYLKPCILILDSLKAASVQNTVQNLREYLEVEWEVKLKTQFSKTNMVDLCPKVPKQDNSSDCGVYLLQYVESFFKDPIVNFELPIHLEKWFPRHVIKTKREDIRELILKLHLQQQKGSSS

SEQ ID NO: 96 - DNA, 23471 bp, Mus musculus
  misc_feature (1)...(23471): n = A,T,C or G
agagcgcacagccgctcgcagcgcaaccgcggcccggctcgccgccccgcccggcccggcccggcgcccgcagctcaggtaagcccgagagagccgccgctccggctcccgcacagccgccgcccccgggccaggggcaagtgtgtgggtcgcgcccagcacccgctcagcttcagagcggcgggcaggttttgcagagcgcgctcagtgactgccagcctcaagccctttcccaattcaaagacttcaaagttcttggctgcggggagaagacttaagtttaaatgggaggtgcggactatggattccaaggcttcccaagtggctacaggtactgagaaatctaaaggagattccactggaacaactccagcccagtatcttatctcctcaggacttaaaactttcagctcttccaagagtagagtgcgaaatcctgccacatgggactggatttgttaatgccagctttttccttagaaatatgaatataaaagtatttttaaatcagtggaaatacggttggaattagtatgaaactaacctttaaaaaaaaaaactttgtgatgatacaaaaaaatcgtttcctcttctggctctaaagcgtgtcaatctataccaggaagtttgttccgtttctagttctttctccctcagctcgactttgagtaggacaagctgcattgaaaagatgaagctatcctcgctggattagtactcttaattatattcaaaaactaatctggaagggagggagcatctacaaaataatcttaatcactggcatttttaaccaaaaataattacacctaaacctaaaaaggctatagctattaataaaggctcaccgtacagtgaacatttggcagatactgagaagctacataatttactggacctttcaaaataaagatcagcaaagggattttttaatgtcaattttagcacactagaggtggtgggaaacttctgtacctttttaatgatctgaacacagtgtgaaacaaaactttaggaactgaaagaatcacttcccctttttaaaagcctctgttttccaaatttgcacaattacaagctgaggatccccaggctaccacttctgttgacttaggctgaaaggctgaaaacgctttcatattgttggcatgggaaagaccatacaagctactgttcaaatgttttacagacacgaactacaaccattttgaggtacaaaggattattttatttgtatttgtcaggggggggggggagttaaatatgagattttaaaatgaaacattttttaatgtgatcaaaattgagaaatgtttttagtagttcttgtagttgagttttaaaagtatatgacacacctactatttttgctgcctatatgattttttgttttgtgttatttttatttggagaaataaaaggctgattttttttttctatcctaaaaataaattacatgttgtcaggtctgaagataggataaataaactgcaagttagtactaagaagtaagattcctccaaaccattacttcaatccaagggaactaactctctcaccatgaagaggggccagcagccagccaggccacagtgaagatgttcagaatatgtaacagaagagaggaggtttgttgtctgtctgtctgtctgtgttttatggacagtgattggaaggagaaaaatccgtgccttgggaaaaggtatctgcattttctatagtagtggaaggggaaaccagaaaccatcaattattgtgtcggctatttcaaagcaccatctataacataaactatagttcaactcttgaaaagcagagcctctgtcaaagccctggaagctgtgtcccagagtctgcctttggttttgagcatacaaacatttttctaacatttcaatcacatattttaaaattacaattttttttcagatagacaattttaagcatgctttaaaaaattaagacctcttttaaaactgaaagttaaaccacatttatcatggatacactatctcaaagtgggctgtctaggtgagcatttcttctctttctctctctctctctctctctctctctctctctctctctctctctctctctctctctctctgcttttttacactgcagttttaggcttgtaaattcatttcccctgttataacaattaacctagccgttaatcagtggactttcattgtattttcttaatacatgaatcaagttgtttgtcctcattttccagtcttgttgaaatttcaactaatttcccataacacacacacacacacacacacacactatggattgcattttaagattctctctggtctgttcccatcaaacaagtacctctggtaataaacagagttcatttaaacatgagaaatgaggaagaatacatttccactaattgtttgtaggttttttacaaggtaaataggaaaacaacaaacaaagaaaacaaaaacccaaactctcatttacaggaaaaaagaagggtgggccaggcagagtcctgatcggaacagaaagcaacattggcttcagcctccctggggacccgaagggtgccacctgttgttcatacatccaatcactacctttggaaaaatgatattaagtttatgtagtttgtgatggactatgaatgctgcttcactttcagctgattaactagtttctgtgaactatgtttaaatgatctttaaagagatttcaagtattcctctggctgcttctgcatcaccacagcatctctgagccaccaacccaatcacttgagtttgatatatactgcaaagactattaggttctcctctggctgcttatttgaagtgaggtgtgtgtgacatttgtctcatccttctatgaggttaagtgattactgatagatcatcaccaatgcagctgtaaataatccacatccttccttttcattaaaaaacaaacttgagattctctttccctcactaatctgcattaaccgtgcctctgactgggaaagctaggccaacaaaggtgaggggccttgccaagcaaacatttttagccatgagaagaaacctccctcttcatgcttgtatgaaaggtttcagcagattaagataggatcacagaacagttgtacttctgagtttaagaacagtaaagagcacagtagcagtgttctttctctaacctgaccagcctcacgtttctatgctcaactggttcccaaataagtctaatacaattccgttatgaagaagttaaggaatgcctgcactgcacaggagacaagataggaaggtgacactggaacaggtagatgcaggcacactcaatttcttgtttccatttggaattacttactcttgtccaaaggccaattatcagcaaatgacattaagtagacaccagaatagcaaacattcaactccacagaaatgcacttaaaacaggccttagtaggttctaaatggattagtaggttctaaagagacaataggatacctcaagagcatgtgtgtgcccacggcctgctaacacagcaaagaataccagcagaccttcacagctgcttgtggcagtagtcatctggtctagatgcctggcattatggaagacactgataactagtgtgacctgcaccagcgatgctgagcaactccagggcagagccaagactcctccactgttggactgtagcccactactggtttctccgttaattagtgctcaaaagacaagcaaacagaggcctcagaagtagcctcagcacagtatgtggtaatttggacataaaattcgttaacaagaagggtggctacggtctcattaatacataataagaggacaaagggaaaggagtgagatgaggttgatacaactcaaccaggccatctggatggcaaggcccaccctttatttgaaggcgagaggtgctgtggacagagtatgtgctgacatcatactgagctaactggacaagtaacttgctagtatcaaacaacagtctgtaatccaccaacctccttagctgtcaacaagccctctttcagaaaccagagacttaatacctttaaaacactctccccataaaatgtagcaaagtcaccttggaaggccatttatgactggtgatacctggctttctttaccctgacaccacacactgagacatatcatacattaactggtttattgtctatatctgggattataaagtacttcagtatcagttttacaaccagctttctccctagcatctagggaagcagctagctattgttactaggtgtgtcactaggacaagaaggatattgtatacaagtatgaataaatgatcctccaacccagaagctcttgactttggaagaaggtatactctgccaatgatggctgaggaggggcccttctacattttgatcacaagtcccaaacacatctctgccactatctgaattaagtacagaattgacttaggaataaaaaggccggaaaacaaaccagagtcaatggagtcagggcatgaaactgctttaaacttccagatatattgtatacacagactacagtcaacagcttcctagctcttggcccatctctctattgcctttaactccttcccccaaataatgagattgaaagtggtgaaagagcaccaggtgaattgccgtagggcatgaaagaacacagcatagtatagtggtttctccctaatgaagaaggattcctctgaatctctgatctctgtgccttggctgtgggcttggaaggtacaagcatgtggtcaaataactaacactccatgtaactgggaaggagcagactgttttcctgtggactttgattccagactttctgtgtgtacttcctatatctaaatttccatgagaggtattttttcctaattccacagttaggcaacttcactgcctactatgaatccagtgtaggtctttcttatatcttgtttcagaaacggcaagcaaaccttgctaagaataagatgggctggtgggacagaaagcaaggtcaccacacaccacaccttgtcactaacctcttagcactagccttaacctcttagcctaacttttgaactgatgatgaagaacaggctcaacagtgcctgtggctccagttgtccttggtcccatctctgcctctcaatgagttaagtgaaaaactgtagattacagagattagctctttataaaaattaaacaacacaggaattaaagacacacacacacacacatacacacacacacacacacacacacacacacacacacacccagagccccccaaaaccagagcctgatgtgactgggtgcatgcttttgatcccagtactggagaggtagaggaaggaaagtcaagaattcacagccatccttggttaaagaaccggttcagccaacctagacagactcttagctcagctgcctccttcccacccccaaattaaataacagaatatagttaattgctgagcttgcttgttagtgatgctactggttacagacagatagtattgtctcattggagaaactaaagagttttagtaataataggctctgccattcattcactgggccagcctcttgtacccttgtttccccaaacctcataaaggaaataatgtcattccccaagtatccccaagtatctcagtatttgggcaaagactgaatcgtgggcaatagtccttttaggaattctgatcaagtagagaatttatttaaaaattgatctgtcaatacaaatagattaatgcagttcggcctaacataaggacattagccctgcaagagctccaaatcaccaatggagcagcctcagggagaagggacgtcttttgagataggctgctcctacaaaagcggaacagcctgatttatgcggtctcatagcccactagtctgggaacaaaagtttaaaggtgattttttttccctctctgacatttttaaaaatgcaaatcaaaacaaaaacagtctcttgagcagatcataagaggaatgtacaatattcattgcatttggactgactgtctgcaactgttaaacttgaagaaaggaacagctaggctaaggagcacatgggaaatgtcctgtttttttttttttttgttttgtttttttgttttttttctgaacccaaaggaatgcagagatgctgtctaagtcgcttagcctagccttagcttgtgagtctgctaattgggaacaacaaaagaggtgaatcactctggaatttgtgggaaatgaatccactttggctacagggaaaattaccatttaaaaatagcatctcttcattcagtgttaacataaacattctatccatcatgtatgaaatggtataggtaggaggcattatataaaaataaaaaacatttataagatataaaacttgtatatataaacatacacgcatgtttatacaacagtatggggaactatcaaataaaggccacaactttgtcaagggatttgtggttccagtcacctctttccacattatactctgcaggagtctccttacagtctcactgagcacgttaggtagagcatagatacaaggaatctaagacaaaggtcaggcttcctggccaagtcctacctgacctcatctgcctttgcctcccagggttcctctcctcacagcaaagaagtgacacgcatgagagcactgtttcctgtgttctccgagttttagcccactcattcaaggagggttattatagtccaagaaaatgttttttcttgggtatatagagtccaaacctagtgaagggtatagaagtatatcaatcctttaagagcaaacaatataaaacaaattaaaaagcagtacaagacaatattgaatagatgtcatagaactaagggctgtgaagactgtagaatggaggtaggccagagctagacaactcaaagcactgctcacaaaaagggaaatgtcactggacttctgaacactgtagagaggttgggtttatttcataaaagtctactaggcaaagagcctaaagtaaaatttaaaacaaaagtttaaaatagggtcaagacacacacagtgattattgaacccactacttagccctcacagcaacctggacttccatggaaaggaagacaacttaaagatttcagtgtctaaggtgaagggattgtgtgtgctgcggaagcagttggcatagttccatccctagagcagatgttcagtaaatgctgcctatgactaagttgtgcctgtctttctacaaggcttcttacttgactgggcttactattatcttctaccgggctgagatagaggggttgcctcaggacccaggaaatgctttgtaggatgcagccaagaggagggtcaggttctctgacacccagcaatcaaccagagaaaatctgtttctgacctaatctcagccactgagagagaagttatccttggtcccaattcccctgctggaaggcaatgaaaacccatgaaaaatccactgctctcctaaaggtgtcaaaggtgcctcatcgcttgaagtaagacccaagttactgagctattaatgtatagaagagagcaagtaacacaaaaggcttaaaaattatcctggaacctgtttaatcttgaaatttcaccgagcctcagcgtcagaggcacacaaatgaagtttcaagtattttcaatttagcatgacattttaagtgttagaacactaaggtttacttctttgcttttaactacagctgtaacttttaccacaacaaatgcttcctatagaaaggagcaaaaatctgaatgtcatgaaattccaaataaggttctcaatatagttacaacccactaaggcttgctaagccatgtgatctcttgatatattaacttgtaaacaacattaaacaggaaaggaagaaaaactcaaaaggttgctggaggcttttgttttatggaaaggaggtctgaggattgttcaaggctttccagatcttagtcacaaaactactgccttcttcctgcatctgtgaggtgggcggcaggtgaaagaagggccaacagtttgttttgagagcattctggtccacattccctgcctattgaaatgggacttgttaaaattggttttcaactgtttacaaagtttagttttgcttcccccacacctagtagctttttaactaatgaaaacatgaatagtttgcctgctcttaaaattcacaataaatgtaaactatagttttatggatgggtattcatatagcaaatgtaaaatacacttggaggtttctctttaattatgccatacatagaccatgccttacagagagaaacataactacagtgactaacattttactagcacacagagtcccaagacacgtcaggtatcgccgagttgtggtcatgtgtgttggaaaactgttgctgaatactgacatcttgatggaagtgcctagagtatagcaagattcatgtaatgagcctgagcttaggcatcagatgtaacgcaatgcttatacccatgggttttctgaaggctcagagatgttagaaaataaaaatgtaacccaaactgctctgaagtattggtcaaggggaaattaaggctctgataaccaacataattttaattagtacaatgagtgtaaagggtgtgaaaaacaaatccataagacaatagttacctgtgttgcaatatattttagaaaagaaaaagcagaaacaaaaacgattcctgcctgcctgtaatttggttttacatatggcctcaaactacagctttccaaagtcataaagcaatgcttaggttatcaagaactaagaaaagttggtgatagcagacagagaatggccactgtagtccttttaacaagaaaacaggctacagagtaacaacccattcttcaactactctaccctctaaatactattaaatgttcccatttccctaatttattacagttaaaatgaagaatgaaaccaaaccaaaaccccaagtcctgtctaagaattgaaatgtttctcattttacactctgggtatttttatctacccagtttccatggcaaactgtttgatttcagtagtcacagtaaaccataagcctctgttgttgtggttttaaaatttctgaagtttgaatttccctcaaacaagtttggaaatgtttggtttcccaagcataccatgctagccgctgcctctgtgtggaaagccaggctcctcacgaggaggtgaaaaccagtgaactcatccactctggctcatgaccggtccttgcttggatgtcttaatgccaagaaattgattaagtaagtcaaagaaagagaaaattgaggaagagggtaacaggaagnnnnnnnnnnnnnnnnnnnnnnnnnnnnnnnnnnnnnnnnnnnnnnnnnnnnnnnnnnnnnnnnnnnnnnnnnnnnnnnnnnnnnnnnnnnnnnnnnnnnnnnnnnnnnnnnnnnnnnnnnnnnnnnnnnnnnnnnnnnnnnnnnnnnnggaaggagggagggagggaggaaaaaaggctaaaaatttggggtgatggttttggaaatatgctcaaaaacacccaaagaaagatatactccttacaactatttttaaggagactaaaagaaacaaaaccaacccataaatctttcaaatatatacttccaatatctgaatgaaaataacaaggtctagaaaagttttaaagggggggggagtaatcaatgagattttgaaaaatttaacacctgttagaatacttttctagaaaatccatttctacttccttaatctactaagatataaaataacagttaaatataatttttaagtaagagaaatacatataaatattatgaacaagctaaaatgattcaaacatttccaagagcatacagttattatgcccttcaagacgctgagaaaatgctgttaaaaatattttccgagaacttaaaagttccttaaaatgttctatggaaatggtatttatgacacagttacctcctctagggactgtgagatgttattactggcaaagtcacaatttttaaaaccatccaaaaataattacaaatttatgctgagtgactaaacttgctatattattacaatgaagaagaggatatttgttaatgtccataaccaaggttcaaagtgccatgggcccatagagaacaaaccaatggcgagtagtagtagtgactcttcctgcctttgacaggtaggatgttctaacacacaggttcagacaggatggtgcacaagatacatgagatcatgggtgtaaacatagcttagcgatgagagcagaggtcagagcatcaattctattgacattccggttctgctaattctgagctggacttctgacaattactaaaggtttctgagcctgtctgagtgctcatttataaagtaaggacaatgattctacatgctataaaacaattgctcaaccgtttctattatttccacactctagaggaaagggactactgtgtgtctgctatttatatttatcctctaactccctaatattgtatctgatacaaaagcagaacaggtatttgtccgttcaaatatctactgcatatcaagtaaatactattcattgctttcaaggtggaaatgaagcactgaatataacagataccagtgactggccagtttactaaataagatgcacatgcatgaacacacatacacacacacacacacacacacacacacacacacacacacaacctctacctataaagtttatatccttttttctagctttattttaagtgtaggagtgttttgcctacatctacgtctgtgcactacatgcataccttgtgcctactgacatcagaagagggtgtccaatcccctggagttatagataactccaggtaagccatcatgtaggtactgggaattgaacctgagtcctctggaagagaagccaaagcacataaccactaagccatttctgcagaccctgaagtttatattctatggaatagtcacataaataagcaatagatggtctggtaaatgggactagataaggtaagagtcctgtacctcccaaggggaaactcaaaacaaaggcacacagaaaactcaaaacctggtatgactggggcatactgagtaaaggggagaccagtaggtcagatgggagaaacagcaaactcttctatggcctatgtgtgttctctctcatgtgacatggttaagtcggggtgggcatgtgactgtgtgaagcacaggtttagctgccaatatattctaattctggtttggttatctgtgctgttcagtaagttaactgttctaaattatatatgtttagttcctccctatcctgtaagataagtgcttgcttatacagctaaaagaattaagtaaaatcaggtgagacactaaagaccttcagtctgtctgtattctcttgtgtgggtgccacatagcacactgggacctagagtccagttccaagactaaaaagctgtgagctcaatggcaggaatatacaacaagctgctgttttacgttaatattttcactattagaatttatctccctactaaaaactttcccataactttacccattattttgtcttttaaagtctggcaaatttaaatgaaacttgtgaagacttatttcatagccagattaatttactttttctgcccctgcttgaggacagtgatctattggactaatctccaagaagggctgtatgacagaaaggatggattaagtagtattcatgtaagaggagagaccggggacctttcatttgtttgtctgtttctagacactctagtctggaaagtacaggaagaaattagcatcagtagttacagtttggaagataaataataaagtgggatgccaacttttaatgttcaaatgttaagatatttatttgtaaatactaatctgtaaacaaaaactgaaatccatattgctcaaggagttaaaagcatataaaatcaacaacaacttcactaatggaacaatatgagtcactaatggtgatgccagacacttagaggctgagacagggagattgcaagttcaaggacaacttgaactattctagggagatcctgtcaaaaatctcccaatataaaagccttaagttaccagttcctatctttcaacctcttatgttctcaggagggaggcagctttgcatagctgcatcctctaaaccttgtttgtttttttttccattttttttttttgaacagatcacaaaacataaataatcttagtggtcttaacaatttatttttaactcaagaagcaaagactaccaaatatttacaggaaaacaaaaacaaaagtctgtgcccttcaggtctgtcctaagtcagctggcccaccctgccacctttgcatgcccgaacagatcaagcctgagttgtgagccccgcagagaaggtgcactttcacatttacaggaggaagaataagtctgactcgagtgtcagacaggctttggggaggtcagctagtgacatccatttggtacgctgcactgcactggaaattgtacattcactttcttctgggaagggagaagagctgaagagtagatctgtgaacaaaaaaagaaatgaaaactaatggctgatctcaaatacaattgagcagcagattaaaaaaaaaaaaaggtatgaataccagaggtaactactacgaggatatttttacaaaagttttctcataaattaactcatcctaaatggcaattcttagccagacaattctccatctcgacccccgagtgctggtacacctataatgtgtgcaaatatttctcattagttggtacagaccactaacacatgtttcagggttgaccagagcacaggctactctcactcaactatctatattacttattgtcaactactagtaaggagagtggggaacaagccctaggtgaaagaaggcaaacatgaaggaacaaaagaaggtaaagggtggagctcaggagggttggaaaggataataagaacaaacagtcacagcattaagaattgaacaccacccccatgtgacatttagagttctgctaggtgccacaacactgttgggaagacataggcttcatgataatccaaagcatcgcatgccaagtaactttgaatgctttcccctaaagagacgtgcagagcagtcctgtcatggctgtggcaggcccaagcagacctaggaagtgcaagaagaactctacttgaaacttggtctggtgaagactgaaaaatctgctcacttggaaagagagaacatgtaatcaaccaaaatgtaaagtctggaaagggagaacacttttgatctgaggcatcttttccaaatagctaagaagcacatttcagaagggagtgagcaaaggtgaccctgtccccttaccctccagaagttagtaggttttctatacaatttcagtagtatatgcttttggttaaagttccctcttgctactgcaacctcccctaactgttcacataaatagcagaataagtattttttgttgttgtttttgttttgttttgttttttgttgtttgtttgtttttcgagacagggtttctctgtgtagccctggctgtcctgaaactcactttgcagaccaggctggcctcgaactcagaaatccgcctgcctctattcttagtataaaatttttgaactgaaaaatggctgggtcacaagatttgtagcactttaaaatcttttgttttatcgtttgtttaatcttgttgtagtactggggattaagcccagaacctctggcatgctagacaaatgctacatccaggcccacatcagtgccattaagccaacactcattaccataagtgttctaactacaaaagttcctgatactatagctcaggagcacacaacacacaattcagctcatgttcaataaggtagtcttctgtccctgttccatttcctttcccaggcccagcccaaggcttccaaatggccacctggtgtgggggccagggcgtatttttgctagcccagatttcacaggtacctctcttttggctttaagatgaaatatactctttgtagttgtctgccttttccactccaactctctgaacttggccttttattaattctgtaatctaaccttttagcatttttctttaagggaaccttcagtttattactttgttctcttaccagttcctgctctgaggtcctcccagaattctgtttatctgatgacatttcccaagctctgttatttcactctctctgacaaatagagaactaagtaagattgtccaaattatgaatcctaactcacttttttcatatatacccaaacaacctcctctcctttacttcatactctaatgcttgctgaatctgggcccatttatggtatctctaaatgatctcaacaatgatgacaggatcttcggtaacagagacataaagcagacacagatgtacactcatacttggctagcagatgccaaaaaaaattctgactgttcttctagatcttgctgaccaagtcagatgaactgagcattacagcatagctatggtatgcggtaactgtaattaaaaggggggaaaaagaacaaccctttgacttgtaagataaataaaaggaagcggcatacacagaattaaaaaggctggtcataagtatttttatgaatgctcctaaaaattagactaaacagtgaaaagtcccattgacaaggcaaggagcacagcaggaaacataaattatagtaactatcttaaaaggaggaagctttccaacaaattccatgttttactcttcacactgctagaactttgtatcagtacaatgcaatgattaaaatgacataataaagcaagaattaaaaacaacataaaatggggtataacacaaccaaagtaccagaactgacagccaggagagcacacttataaatgtgaagaaagcagtgtgtggatgcagtattctgcttacggatcagcgcaccaaatcagaaagaaaaagtatcggagtagcctctattaaggaacatgatgggctagcatgtgatcactgaaactctcctaaccaaataaccagacagagtcaaggtgcaaagatgtggagaaagaaagaaatggttctagtagtcttggtttttttagaggctccgtaattatgaaatagacacaatgatgtatttagaaaatactgaggaagaaacctactcataccacatttacttaaatacctaaaacctgtatgttaaacactagaaaatcatctttaaaaagtaaacaaaactgcttaggacaatgctaacattctccatagtatggcatatttgttcattgttctagttattcattcaaacaaaaaacaaaaaccacccattcattcattcattcattcattcattcaaacacttcttatttggttccttccataggacttctcaggagccagtgtgaaaaacataaataaatcccttacacgcatggtgcattctcaagaagttaatattttagtggggttgatatgatgtccataaataatatcaaaagcaacatggtgagaactgtaaaataaatcctatgggtatgactggctatacagtatttagatgggcaccatctgttttatgtgtgcattatatggtgcatattattaaccatgtctcactgagaagaaaaatacaggctgatgcatgttgacatatatgcatataaataaaaactgaaaagactctcaagccagcattatggttggtacaaaaagcactcaagatgacagatgtgatatgtttgaaaaagcaagtaattggcattgcacacagtaacagtgatgaatcacagtaagctgaaacaactttaagccataaaagaaactcaaaagctgtaataagacattgctttaagtcagtttggatttctttacctcacatttgtgtccataaaatcagcttcttcaacccgtttttactggacaggatgttcctgtaatcctgtaatgtcagcatttgtgtatgaacatgagtccttcaagacagtagtcttcaaatggaggtgcatgcacacccaagggcacacaaacttggcagggctgcaaccatgcttacattcacatttcccatatactctctgcctggtaagtttgtgtccagtgagctctcccttcccaacaaccctttcagagtagcctccatactcagcaaatgcttaccaaaagaattttcctaggcttaaaaactcctccagaatgagctacagagaatcccaagagagcacaggaacaatagcagctctggatagaaagcagtagttatctgagctcatctggggacactggggaaaacttaggacattcctacacagctatcacttaaaaattagactctcttcccaaagaatgacttgactacctagtttgttagtggagatttttagattgaatggtagagagtaaaatgtatcttctataccaatttcaacttgaacttttaaaaatgtaggtgttaaaagaataaggtttataagatcactgtgtgtatatatgtgtgtatgtatatttttccatacaattaaaagtgacatctttcctttaactccagtttccaattcagatagttccctgatagacatcatgtgtctggatcaattccgggatgtggtctgcagtctggcttgaatttgcgtcgtgtaaaaatgaggtgtaaaacttgggcctagtcagcagggaggatagtatcactaggtgtacatgttcctcggattggagcaaatctcctggcctcatcagttctctatgtttgcattggtggtggagcttagggagatggacatatcagcgagattatgaaaaccaggaagaaggtgaatggcacttccatcatgctggaaaggtgcaccatgctcgccaccaaaacactgagcacaataagctggttactctagtgacaggacttagttattccactttaagggtcttttactgtacttaaaagaaaacctatccctcttttcggaaagaggggacagcatgtgctcttgtttaaaaagctgagaagaaatccttgagagttgttgtgaaagtgttctccagtaaaggaagactctgagctgctgcaatggcttgttgtcaccatcaagtgtgaaaaggaagctaaggcagggctgttcagtcaccatagccgcttaccctgacccttgcagtgaactgcacatctctaacctccaggaagaatcggcatggttctcaggcttccaggtgtctcaggcagggagagtcatgaagtctcctgccaagaccacagatgagctcaccagcagccgcaccccagcatcctgcccagtagcttctgaactttacatgtcagccttttgtcagatccttaaaacaggacaaactaaaacaagatcctatcacccaaaaagcttaagaattcttacattatgtgattattttaaacatgctcccttttccttcttctatattatacaaagaacagattaggatctcataaagaagtctttattctccagactgccctaaatttgtttacttaaaaaaaaagttctctcagattcttaatttacaagtgctctgggacaaggatgaaagatagcagattgttaattaattagattttagaatagatttattaagccaggcacgataaagtactatcctaaatgaggcaaaaaggaccatgttcaaggccagcctcagcacaactacaagacacacagatagatggatggatggatggatggatggataggatggatggatgggcaggcaggctggcttaagcaggcttattgatatgatatgatagatagatagatggatagagatagatagatagatagatagatagcaggctggcttaagcaggcttattgatatgatagatagatagatagatagatagatagatagatagatagatagatagatggatggatagataggcaggcaggctggcttaagcaggcttattgatatgatagatagatagatagatagatagatagataggtaggtagataggtaggtagataggtagatagatagatagatagcaggctggcttaagcaggcttattgatatgatagatagatagatagatagatagatagatagatagatggatagatagatggatggatagataggcaggcaggctggcttaagcaggcttattgatatgatagatagatagatagatagatagatagatagatagatagatggatggatagataggcaggcaggctggcttaagcaggcttattgatatgatagatagatagatagatggatggatagatagatagatagatagatagatggatagatagatggatagatagatagatagatagatggatggatagataggcaggcaggctggcttaagcaggcttattgacatattatgaactctacaggcttgattaaaaagcacatatttatattttcaagttgttagtccttttacttttcagtaattccattctattttagcttctgcaccataccacagcgctgcaattatatcatctataattagcccattcccagtataattaagagactcacaagttaaatgtacaatcctacagaggtagccaagtgcatgggaaagagcatatattctgcatgtcttcctgttacaataattttaaatgaagaaaagtagtgtgttagagtcatttaagaggaattctctatgttcctgctaacagggtttctttatttctagcactggatttctttctttcttttttttttaattaggtattttcttcatttacatttccagtgctatcacaaaagttccccataccctcccccacccactcccctacccacccactcccactttttggccctggcattcccctatactgaggcatataaagtttgcacgaccaatgggcctctctttccactgatggccaactaggccatcttctgatacatatgcagctagagacacaagctctggggggtactggttagttcataatgttgttccaccaaagggttgcagacccctttacctccttgggtactttctctagttcctccattggggaccctgtgatccatccaatagctaactgtgagcatccacttctgtgtttgctaggccccggcatagtctcacaagagacagctatatgagggtcctttcatcaaaatcttgctagtgtatgcaatggtgtcagcgtttggaggctgattatgggatagatccccagatatggcagtctctagatggttcgtcctttcgtctcagcaactccttccatgggtgttttgttcccaattctaagaaggtggtcttcgttcttgtagagtttcatgagtttcacaaattgtatcttatatcttgggtattctaagtatctgggctaatattcacttatcagtgagtacatatcatgtgagttcttttgtgattgggttacctttcttatcaggaagctctttactgttaagctccttgcctttgaacatgttagaacactccaaaccgtaactcagttgcctcttagttcccctcttacatgacaatcagtagacaaagacatatgaagtggttcccaacatgctatcttattagtgcaaaccaccattttaatacacttttgtgtccgtggtgtccataactcctaaacaaatagaataaaatgccattttaccgaataaccaacgtgttaaacagtaactagtaatatagcacatgcgtaatggctcaagcaagccacttaacacagggcaagaatgagtaattcaaaaagtgccatggcaacagttatcaagtgtttaccaaatgccaggactgagataatgttagatggatgaattgcctcactttcacaaaaagcccctgagatcatttgaggaaatggagaactgtgtaggttaattagctggtcagggccggtgtagtttcaaagccaagtctaactgaagtcttaagtctgtaccttcctttacagctttcaggttgcactacccagggatcatgctacacaatttagaacaaataaatactactgcccatactcttctaagcctaacggtgaccttgaactgttactaatcaatgttaaacaaattttaagccaggtatctgggttggtttttttttttttttttttttttggttttggtttttttgtttttcgtttttttaataacacttctcaggaagctaactatgagcaattgctttttattacaaagaaggttaattacagctggtgaattcctaaagtactaactgcagtctgtgctcttgtattttcagattaaagaaactaattgatcaagaaactgcgtcccaggaaaagaaggagcaagaaaaggagaagaggatcaagaccctgaaggaggagctgaccaagctgaagtcctttgctttgatggtggtggatgaacaacaacggcttacagctcaactcgcccttcaaagacagaaaatccaagctctgaccacaagtgcaaaggaaacacagggtaaactagcccttgctgaggccagagctcaggaagaagagcagaaggcaaccagactagaaaaagaactgcagacacagaccacagagtttcaccaaaaccaagacaaaattatggcgaagctcaccaatgaggacagtcaaaatcgccagctccgacagaagctggcagcactcagtcggcaaattgatgagttagaagagaccaacaggtctttaagaaaagccgaggaagagctgcaggatataaaagacaaaataaacaagggagaatatggaaactctggcatcatggatgaagtggatgagctcaggaagcgcgtgctggacatggaagggaaagatgaagagctcataaaaatggaggagcagtgcagagacctcaataagaggctagagaaagagacagtacagagtaaagacttcaaactagaggttgacaaacttagtgtaaggatcacagctctggaaaaattagaagatgctttagacaaaagcaaacaagaatgctactctctgaaatgcaatttagaaaaagaaaagatgaccacaaagcaattgtctgaagagctggagagtttaaatgccagaatcaaagagctagaagccattgaaagtcggctagaaaagacagaaatcacactaaaggatgatttaactaaactgaaaactttaactgtgatgcttgtagatgaacgcaaaacaatgagtgaaaaattaaagcaaacagaagataagttacaaagcaccacctctcagctccaagcagagcaaaataaagtaacaacagtgactgagaagttaattgaggaaaccaagagggcactcaagtccaaaactgatgcagaagagaagatgtacagtgtaaccaaggagagagatgacctcagaaataaactgaaagcagaagaagagaaaggacatgatctcttgtcaaaagttactatattgaaaaacaggcttcagtcactggaagcaattgagaaagattttgtaaaaaacaaattaaaccaagactccagtaagtccacagcagcattacaccaagaaaacaataagattaaagagctctctcaagaagtggaaaatctgaaactgaagctaaaggatatgaaagccattgaggatgacctcatgaaaacagaggatgagtacgagaccttagaacggaggtatgctaacgagagagacaaggctcagtttctgtctcaggagctggaacatgccaagatggagcttgccaagtacaagttggccgagaagacagagtccagccacgagcagtggctctttaggaggctccaggaagaagaagcaaaatcagggcacctgtccagagaagtggatgcattaaaagagaaaattcatgagtacatggccacagaggacctaatatgtcacctccaaggagaccactcccttctgcaaaagaaactaaaccaacaagaaaacaggaacagagatttgggaagagagattgaaaacctcactaaagagttagaaaggtataggcactttagtaagagcctccggcctagtctcaacggaagaagaatctctgacccgcaagtattttctaaagaagttcaaacggaagcagcagacagtgagccaccagactacaagagcctcattcctctggaaagagcagtgatcaatggtcagttctatgaggagaatgaggaccaggatgacgaccctaatgaggaggagtctgtgctgtccttcagatgcagccagtcttcttctcttcctatgaacaggaaactatggattccctggatgaaatccaaggagggccatcctcagaatggaaaaatacaaactaagtccaatggcaactttgtacaacctggagatcttgttctaagtcacacacctgggcagccacttcacataaaggttactccagaccacattcaaaatacagctactcttgaaatcacaagtccaaccacagagagtcctcactcctacaccagcacagcggtgataccaaactgtggcaccccaaagcaaaggattaccattctccaaaatgcctctataacaccaattaagtccaaaagctctacagaaagccttatgaacttagagcaaagcatgtccccagttaccatggcaacctttgccagagcacagaccccagagtcctgtggttctgtgactccagaacggacaatgtcacctattcaggttttggctatgactggttcacctagttctcctgagcaaggctgctccccagagccgatagaaatcagcgccaagcatgcaattttcagagtctccccagaccggcagtcatcatggcagtttcaacgttcaaacagtaacagctcaagtgtgataactactgaggataataaaatccacattcacttaggaagtccttacatgcaagctgtggctggccccatgagacctgccagcccttcagcaccactgcaggataacagaactcaaggcttaactaatggggcactaaacaaaacaaccaataaagtcaccagcagtattactatcacaccaacagccacacctcttcctcgacaatcacaaattacagtaagtaatatatataactgaccaccctcaccctcatccagttcatactgatattcttgcaaggaactcagtccctttttaatcacccctccaaatcccttagaagaatgactaaacctgtactttgggaagatttgtgcatggactgaacaagagtatctggaactaactatgtgttgcctgcatagtcacatcaagtgtgcacttactgtatatctttttatttacatacctgtatggaaaatatttagtctgcacttgtataaatacatctttatgtatttcattttccataactcactttaatttgactgcaacttgtcttggtgaattacttaacattataaaacagtaaatagtttgttactttt

SEQ ID NO: 97 - DNA, 3225 bp, Mus musculus
agagcgcacagccgctcgcagcgcaaccgcggcccggctcgccgccccgcccggcccggcccggcgcccgcagctcagattaaagaaactaattgatcaagaaactgcgtcccaggaaaagaaggagcaagaaaaggagaagaggatcaagaccctgaaggaggagctgaccaagctgaagtcctttgctttgatggtggtggatgaacaacaacggcttacagctcaactcgcccttcaaagacagaaaatccaagctctgaccacaagtgcaaaggaaacacagggtaaactagcccttgctgaggccagagctcaggaagaagagcagaaggcaaccagactagaaaaagaactgcagacacagaccacagagtttcaccaaaaccaagacaaaattatggcgaagctcaccaatgaggacagtcaaaatcgccagctccgacagaagctggcagcactcagtcggcaaattgatgagttagaagagaccaacaggtctttaagaaaagccgaggaagagctgcaggatataaaagacaaaataaacaagggagaatatggaaactctggcatcatggatgaagtggatgagctcaggaagcgcgtgctggacatggaagggaaagatgaagagctcataaaaatggaggagcagtgcagagacctcaataagaggctagagaaagagacagtacagagtaaagacttcaaactagaggttgacaaacttagtgtaaggatcacagctctggaaaaattagaagatgctttagacaaaagcaaacaagaatgctactctctgaaatgcaatttagaaaaagaaaagatgaccacaaagcaattgtctgaagagctggagagtttaaatgccagaatcaaagagctagaagccattgaaagtcggctagaaaagacagaaatcacactaaaggatgatttaactaaactgaaaactttaactgtgatgcttgtagatgaacgcaaaacaatgagtgaaaaattaaagcaaacagaagataagttacaaagcaccacctctcagctccaagcagagcaaaataaagtaacaacagtgactgagaagttaattgaggaaaccaagagggcactcaagtccaaaactgatgcagaagagaagatgtacagtgtaaccaaggagagagatgacctcagaaataaactgaaagcagaagaagagaaaggacatgatctcttgtcaaaagttactatattgaaaaacaggcttcagtcactggaagcaattgagaaagattttgtaaaaaacaaattaaaccaagactccagtaagtccacagcagcattacaccaagaaaacaataagattaaagagctctctcaagaagtggaaaatctgaaactgaagctaaaggatatgaaagccattgaggatgacctcatgaaaacagaggatgagtacgagaccttagaacggaggtatgctaacgagagagacaaggctcagtttctgtctcaggagctggaacatgccaagatggagcttgccaagtacaagttggccgagaagacagagtccagccacgagcagtggctctttaggaggctccaggaagaagaagcaaaatcagggcacctgtccagagaagtggatgcattaaaagagaaaattcatgagtacatggccacagaggacctaatatgtcacctccaaggagaccactcccttctgcaaaagaaactaaaccaacaagaaaacaggaacagagatttgggaagagagattgaaaacctcactaaagagttagaaaggtataggcactttagtaagagcctccggcctagtctcaacggaagaagaatctctgacccgcaagtattttctaaagaagttcaaacggaagcagcagacagtgagccaccagactacaagagcctcattcctctggaaagagcagtgatcaatggtcagttctatgaggagaatgaggaccaggatgacgaccctaatgaggaggagtctgtgctgtccttcagatgcagccagtcttcttctcttcctatgaacaggaaactatggattccctggatgaaatccaaggagggccatcctcagaatggaaaaatacaaactaagtccaatggcaactttgtacaacctggagatcttgttctaagtcacacacctgggcagccacttcacataaaggttactccagaccacattcaaaatacagctactcttgaaatcacaagtccaaccacagagagtcctcactcctacaccagcacagcggtgataccaaactgtggcaccccaaagcaaaggattaccattctccaaaatgcctctataacaccaattaagtccaaaagctctacagaaagccttatgaacttagagcaaagcatgtccccagttaccatggcaacctttgccagagcacagaccccagagtcctgtggttctgtgactccagaacggacaatgtcacctattcaggttttggctatgactggttcacctagttctcctgagcaaggctgctccccagagccgatagaaatcagcgccaagcatgcaattttcagagtctccccagaccggcagtcatcatggcagtttcaacgttcaaacagtaacagctcaagtgtgataactactgaggataataaaatccacattcacttaggaagtccttacatgcaagctgtggctggccccatgagacctgccagcccttcagcaccactgcaggataacagaactcaaggcttaactaatggggcactaaacaaaacaaccaataaagtcaccagcagtattactatcacaccaacagccacacctcttcctcgacaatcacaaattacagtaagtaatatatataactgaccaccctcaccctcatccagttcatactgatattcttgcaaggaactcagtccctttttaatcacccctccaaatcccttagaagaatgactaaacctgtactttgggaagatttgtgcatggactgaacaagagtatctggaactaactatgtgttgcctgcatagtcacatcaagtgtgcacttactgtatatctttttatttacatacctgtatggaaaatatttagtctgcacttgtataaatacatctttatgtatttcattttccataactcactttaatttgactgcaacttgtcttggtgaattacttaacattataaaacagtaaatagtttgttactttt

SEQ ID NO: 98 - protein, 887 aa, Mus musculus
MVVDEQQRLTAQLALQRQKIQALTTSAKETQGKLAEARAQEEEQKATRLEKELQTQTTEFHQNQDKIMAKLTNEDSQNRQLRQKLAALSRQIDELEETNRSLRKAEEELQDIKDKINKGEYGNSGIMDEVDELRKRVLDMEGKDEELIKMEEQCRDLNKRLEKETVQSKDFKLEVDKLSVRITALEKLEDALDKSKQECLKCNLEKEKMTTKQLSEELESLNARIKELEAIESRLEKTEITLKDDLTKLKTLTVMLVDERKTMSEKLKQTEDKLQSTTSQLQAEQNKVTTVTEKLIEETKRALKSKTDAEEKMYSVTKERDDLRNKLKAEEEKGHDLLSKVTILKNRLQSLEAIEKDFVKNKLNQDSSKSTAALHQENNKIKELSQEVENLKLKLKDMKAIEDDLMKTEDEYETLERRYANERDKAQFLSQELEHAKMELAKYKLAEKTESSHEQWLFRRLQEEEAKSGHLSREVDALKEKIHEYMATEDLICHLQGDHSLLQKKLNQQENRNRDLGREIENLTKELERYRHFSKSLRPSLNGRRISDPQVFSKEVQTEAADSEPPDYKSLIPLERAVINGQFYEENEDQDDDPNEEESVLSFRCSQSSSLPMNRKLWIPWMKSKEGHPQNGKIQTKSNGNFVQPGDLVLSHTPGQPLHIKVTPDHIQNTATLEITSPTTESPHSYTSTAVIPNCGTPKQRITILQNASITPIKSKSSTESLMNLEQSMSPVTMATFARAQTPESCGSVTPERTMSPIQVLAMTGSPSSPEQGCSPEPIEISAKHAIFRVSPDRQSSWQFQRSNSNSSSVITTEDNKIHIHLGSPYMQAVAGPMRPDSAPLQDNRTQGLTNGALNKTTNKVTSSITITPTATPLPRQSQITVSNIYN

SEQ ID NO: 99 - DNA, 4629 bp, Homo sapiens
ttcagattaaagaagctaattgatcaagaaatcaagtctcaggaggagaaggagcaagaaaaggagaaaagggtcaccaccctgaaagaggagctgaccaagctgaagtcttttgctttgatggtggtggatgaacagcaaaggctgacggcacagctcacccttcaaagacagaaaatccaagagctgaccacaaatgcaaaggaaacacataccaaactagcccttgctgaagccagagttcaggaggaagagcagaaggcaaccagactagagaaggaactgcaaacgcagaccacaaagtttcaccaagaccaagacacaattatggcgaagctcaccaatgaggacagtcaaaatcgccagcttcaacaaaagctggcagcactcagccggcagattgatgagttagaagagacaaacaggtctttacgaaaagcagaagaggagctgcaagatataaaagaaaaaatcagtaagggagaatatggaaacgctggtatcatggctgaagtggaagagctcaggaaacgtgtgctagatatggaagggaaagatgaagagctcataaaaatggaggagcagtgcagagatctcaataagaggcttgaaagggagacgttacagagtaaagactttaaactagaggttgaaaaactcagtaaaagaattatggctctggaaaagttagaagacgctttcaacaaaagcaaacaagaatgctactctctgaaatgcaatttagaaaaagaaaggatgaccacaaagcagttgtctcaagaactggagagtttaaaagtaaggatcaaagagctagaagccattgaaagtcggctagaaaagacagaattcactctaaaagaggatttaactaaactgaaaacattaactgtgatgtttgtagatgaacggaaaacaatgagtgaaaaattaaagaaaactgaagataaattacaagctgcttcttctcagcttcaagtggagcaaaataaagtaacaacagttactgagaagttaattgaggaaactaaaagggcgctcaagtccaaaaccgatgtagaagaaaagatgtacagcgtaaccaaggagagagatgatttaaaaaacaaattgaaagcggaagaagagaaaggaaatgatctcctgtcaagagttaatatgttgaaaaataggcttcaatcattggaagcaattgagaaagatttcctaaaaaacaaattaaatcaagactctgggaaatccacaacagcattacaccaagaaaacaataagattaaggagctctctcaagaagtggaaagactgaaactgaagctaaaggacatgaaagccattgaggatgacctcatgaaaacagaagatgaatatgagactctagaacgaaggtatgctaatgaacgagacaaagctcaatttttatctaaagagctagaacatgttaaaatggaacttgctaagtacaagttagcagaaaagacagagaccagccatgaacaatggcttttcaaaaggcttcaagaagaagaagctaagtcagggcacctctcaagagaagtggatgcattaaaagagaaaattcatgaatacatggcaactgaagacctaatatgtcacctccagggagatcactcagtcctgcaaaaaaaactaaatcaacaagaaaacaggaacagagatttaggaagagagattgaaaacctcactaaggagttagagaggtaccggcatttcagtaagagcctcaggcctagtctcaatggaagaagaatttccgatcctcaagtattttctaaagaagttcagacagaagcagtagacaatgaaccacctgattacaagagcctcattcctctggaacgtgcagtcatcaatggtcagttatatgaggagagtgagaatcaagacgaggaccctaatgatgagggatctgtgctgtccttcaaatgcagccagtctactccatgtcctgttaacagaaagctatggattccctggatgaaatccaaggagggccatcttcagaatggaaaaatgcaaactaaacccaatgccaactttgtgcaacctggagatctagtcctaagccacacacctgggcagccacttcatataaaggttactccagaccatgtacaaaacacagccactcttgaaatcacaagtccaaccacagagagtcctcactcttacacgagtactgcagtgataccgaactgtggcacgccaaagcaaaggataaccatcctccaaaacgcctccataacaccagtaaagtccaaaacctctaccgaagacctcatgaatttagaacaaggcatgtccccaattaccatggcaacctttgccagagcacagaccccagagtcttgtggttctctaactccagaaaggacaatgtcccctattcaggttttggctgtgactggttcagctagctctcctgagcagggacgctccccagaaccaacagaaatcagtgccaagcatgcgatattcagagtctccccagaccggcagtcatcatggcagtttcagcgttcaaacagcaatagctcaagtgtgataactactgaggataataaaatccacattcacttaggaagtccttacatgcaagctgtagccagccctgtgagacctgccagcccttcagcaccactgcaggataaccgaactcaaggcttaattaacggggcactaaacaaaacaaccaataaagtcaccagcagtattactatcacaccaacagccacacctcttcctcgacaatcacaaattacagtaagtaatatatataactgaccacgctcaccctcatccagtccatactgatatttttgcaaggaactcaatccttttttaatcatccctccatatcccccaagactgactgaactcgtactttgggaaggtttgtgcatgaactatacaagagtatctgaaactaactgttgcctgcatagtcatatcgagtgtgcacttactgtatatcttttcatttacatacttgtatggaaaatatttagtctgcacttgtataaatacatctttatgtatttcattttccataactcactttaatttgactgcaacttgtcttggtgaaatactttaacattataaaacagtaaataatttgttatttttaccattgcttgctgaattttcttttggtcattctgtgttatatttctgcatgtacaatagaattttgtcttttgcttatagtctctattaattcttccttaaaaacaaacaggacctatgtcccatttatggtcaacttctaatcacatattagaggagagaaaagtggttcaaataaataaaaattacatctctttgatttcaaagtgaactataagatctttcagaagcaaacataacttcatgcttgggatatatttcagtatctctaagagcccagcacagtgcttagactacattaggaacttaaatgtttataataatgaaataaaatactaccgaataattttggttttcatgagcacatagaagcagatgataaaattaaaaagctctgacatgtgataggaagccagagaaagtacatttggaaatatagttacgttgacaaatcaagagttgactgtatttctaccagagatcaaacctcccatagaacatgtatgtctacaaccaaatctggaaccagccactgtgacataaactcttgaacactctacttcaaagcaaaaaaaaaaaaagaaaatgtcattcttgtttctttttcctatggggttcccaaaacagtttgaattacttaatgtaggtgctacctaccctgttcataaggggcctgcattcaaaagcttacagtttttttttttgttttaacctcttacagttttttttaaacaagcaaataaaagccaaagatagttatgaacataagctatagaaaaggcatatttaaaaaatacagtatgttagttgaaagaagtaatatagtgtgaatttcttctgtgattattatgccatttacaatatagatgagaataactcagccgaatcctcctagaaattctgatatctgcctcatgggagtccctggggataatccatacttctgagcagagaacaacagctttcagggaacatttaaattacaagtatggtccccaagtcacattccaaaacgacgatttcagacaaagtagcttattgccatttccctttttctaacctcataattgttaatttagtgtggttaattttattgccagttattgattttaaatacaattcatttagacatccaggcaaactgtgaagatctttaagaataaaaggaagctttcacaattatcctcctttcccctgcaaaatcaatttcatgatagtaaagcgaggatttgttgacagaaacacttccatggtgacgaactgcaacaccaacgctatgggcttgcatcatcattaaataaatttggatgaaagctgaggctgctgatgaatgagaaagcttctgtttaaacacatttatcttaggaatcaacagtgacccaactgtattacaaaatacatgatggtctaaatgtttattaaaactgtttttaagtcaccttgggccagaactctagaaggaatggcaaacttaattttagc

SEQ ID NO: 100 - DNA, 3295 bp, Homo sapiens
ttcagattaaagaagctaattgatcaagaaatcaagtctcaggaggagaaggagcaagaaaaggagaaaagggtcaccaccctgaaagaggagctgaccaagctgaagtcttttgctttgatggtggtggatgaacagcaaaggctgacggcacagctcacccttcaaagacagaaaatccaagagctgaccacaaatgcaaaggaaacacataccaaactagcccttgctgaagccagagttcaggaggaagagcagaaggcaaccagactagagaaggaactgcaaacgcagaccacaaagtttcaccaagaccaagacacaattatggcgaagctcaccaatgaggacagtcaaaatcgccagcttcaacaaaagctggcagcactcagccggcagattgatgagttagaagagacaaacaggtctttacgaaaagcagaagaggagctgcaagatataaaagaaaaaatcagtaagggagaatatggaaacgctggtatcatggctgaagtggaagaagctcataaaaatggaggagcagtgcagagatctcaataagaggcttgaaagggagacgttacagagtaaagactttaaactagaggttgaaaaactcagtaaaagaattatggctctggaaaagttagaagacgctttcaacaaaagcaaacaagaatgctactctctgaaatgcaatttagaaaaagaaaggatgaccacaaagcagttgtctcaagaactggagagtttaaaagtaaggatcaaagagctagaagccattgaaagtcggctagaaaagacagaattcactctaaaagaggatttaactaaactgaaaacattaactgtgatgtttgtagatgaacggaaaacaatgagtgaaaaattaaagaaaactgaagataaattacaagctgcttcttctcagcttcaagtggagcaaaataaagtaacaacagttactgagaagttaattgaggaaactaaaagggcgctcaagtccaaaaccgatgtagaagaaaagatgtacagcgtaaccaaggagagagatgatttaaaaaacaaattgaaagcggaagaagagaaaggaaatgatctcctgtcaagagttaatatgttgaaaaataggcttcaatcattggaagcaattgagaaagatttcctaaaaaacaaattaaatcaagactctgggaaatccacaacagcattacaccaagaaaacaataagattaaggagctctctcaagaagtggaaagactgaaactgaagctaaaggacatgaaagccattgaggatgacctcatgaaaacagaagatgaatatgagactctagaacgaaggtatgctaatgaacgagacaaagctcaatttttatctaaagagctagaacatgttaaaatggaacttgctaagtacaagttagcagaaaagacagagaccagccatgaacaatggcttttcaaaaggcttcaagaagaagaagctaagtcagggcacctctcaagagaagtggatgcattaaaagagaaaattcatgaatacatggcaactgaagacctaatatgtcacctccagggagatcactcagtcctgcaaaaaaaactaaatcaacaagaaaacaggaacagagatttaggaagagagattgaaaacctcactaaggagttagagaggtaccggcatttcagtaagagcctcaggcctagtctcaatggaagaagaatttccgatcctcaagtattttctaaagaagttcagacagaagcagtagacaatgaaccacctgattacaagagcctcattcctctggaacgtgcagtcatcaatggtcagttatatgaggagagtgagaatcaagacgaggaccctaatgatgagggatctgtgctgtccttcaaatgcagccagtctactccatgtcctgttaacagaaagctatggattccctggatgaaatccaaggagggccatcttcagaatggaaaaatgcaaactaaacccaatgccaactttgtgcaacctggagatctagtcctaagccacacacctgggcagccacttcatataaaggttactccagaccatgtacaaaacacagccactcttgaaatcacaagtccaaccacagagagtcctcactcttacacgagtactgcagtgataccgaactgtggcacgccaaagcaaaggataaccatcctccaaaacgcctccataacaccagtaaagtccaaaacctctaccgaagacctcatgaatttagaacaaggcatgtccccaattaccatggcaacctttgccagagcacagaccccagagtcttgtggttctctaactccagaaaggacaatgtcccctattcaggttttggctgtgactggttcagctagctctcctgagcagggacgctccccagaaccaacagaaatcagtgccaagcatgcgatattcagagtctccccagaccggcagtcatcatggcagtttcagcgttcaaacagcaatagctcaagtgtgataactactgaggataataaaatccacattcacttaggaagtccttacatgcaagctgtagccagccctcccttcagcaccactgcaggataaccgaactcaaggcttaattaacggggcactaaacaaaacaaccaataaagtcaccagcagtattactatcacaccaacagccacacctcttcctcgacaatcacaaattacagtaagtaatatatataactgaccacgctcaccctcatccagtccatactgatatttttgcaaggaactcaatccttttttaatcatccctccatatcccccaagactgactgaactcgtactttgggaaggtttgtgcatgaactatacaagagtatctgaaactaactgttgcctgcatagtcatatcgagtgtgcacttactgtatatcttttcatttacatacttgtatggaaaatatttagtctgcacttgtataaatacatctttatgtatttcattttccataactcactttaatttgactgcaacttgtcttggtgaaatactttaacattataaaacagtaaataatttgttatttttaccattgcttgctgaattttcttttggtcattctgtgttatatttctgcatgtacaatagaattttgtcttttgcttatagtctctattaattcttccttaaaaacaaacaggacctatgtcccatttatggtcaacttctaatcacatattagaggagagaaaagtggttcaaataaataaaaattacatctctttgatttc

SEQ ID NO: 101 - protein, 702 aa, Homo sapiens
MLVSWLKWKKLIKMEEQCRDLNKRLERETLQSKDFKLEVEKLSKRIMALEKLEDAFNKSKQECLKCNLEKERMTTKQLSQELESLKVRIKELEAIESRLEKTEFTLKEDLTKLKTLTVMFVDERKTMSEKLKKTEDKLQAASSQLQVEQNKVTTVTEKLIEETKRALKSKTDVEEKMYSVTKERDDLKNKLKAEEEKGNDLLSRVNMLKNRLQSLEAIEKDFLKNKLNQDSGKSTTALHQENNKIKELSQEVERLKLKLKDMKAIEDDLMKTEDEYETLERRYANERDKAQFLSKELEHVKMELAKYKLAEKTETSHEQWLFKRLQEEEAKSGHLSREVDALKEKIHEYMATEDLICHLQGDHSVLQKKLNQQENRNRDLGREIENLTKELERYRHFSKSLRPSLNGRRISDPQVFSKEVQTEAVDNEPPDYKSLIPLERAVINGQLYEESENQDEDPNDEGSVLSFKCSQSTPCPVNRKLWIPWMKSKEGHLQNGKMQTKPNANFVQPGDLVLSHTPGQPLHIKVTPDHVQNTATLEITSPTTESPHSYTSTAVIPNCGTPKQRITILQNASITPVKSKTSTEDLMNLEQGMSPITMATFARAQTPESCGSLTPERTMSPIQVLAVTGSASSPEQGRSPEPTEISAKHAIFRVSPDRQSSWQFQRSNSNSSSVITTEDNKIHIHLGSPYMQAVDPFSTTAG

SEQ ID NO: 102 - DNA, 4629 bp, Homo sapiens; identical to SEQ ID NO: 99

SEQ ID NO: 103 - protein, 885 aa, Homo sapiens
MVVDEQQRLTAQLTLQRQKIQELTTNAKETHTKLAEARVQEEEQKATRLEKELQTQTTKFHQDQDTIMAKLTNEDSQNRQLQQKLAALSRQIDELEETNRSLRKAEEELQDIKEKISKGEYGNAGIMAEVEELRKRVLDMEGKDEELIKMEEQCRDLNKRLERETLQSKDFKLEVEKLSKRIMALEKLEDAFNKSKQECLKCNLEKERMTTKQLSQELESLKVRIKELEAIESRLEKTEFTLKEDLTKLKTLTVMFVDERKTMSEKLKKTEDKLQAASSQLQVEQNKVTTVTEKLIEETKRALKSKTDVEEKMYSVTKERDDLKNKLKAEEEKGNDLLSRVNMLKNRLQSLEAIEKDFLKNKLNQDSGKSTTALHQENNKIKELSQEVERLKLKLKDMKAIEDDLMKTEDEYETLERRYANERDKAQFLSKELEHVKMELAKYKLAEKTETSHEQWLFKRLQEEEAKSGHLSREVDALKEKIHEYMATEDLICHLQGDHSVLQKKLNQQENRNRDLGREIENLTKELERYRHFSKSLRPSLNGRRISDPQVFSKEVQTEAVDNEPPDYKSLIPLERAVINGQLYEESENQDEDPNDEGSVLSFKCSQSTPCPVNRKLWIPWMKSKEGHLQNGKMQTKPNANFVQPGDLVLSHTPGQPLHIKVTPDHVQNTATLEITSPTTESPHSYTSTAVIPNCGTPKQRITILQNASITPVKSKTSTEDLMNLEQGMSPITMATFARAQTPESCGSLTPERTMSPIQVLAVTGSASSPEQGRSPEPTEISAKHAIFRVSPDRQSSWQFQRSNSNSSSVITTEDNKIHIHLGSPYMQAVDVRPDSAPLQDNRTQGLINGALNKTTNKVTSSITITPTATPLPRQSQITVSNIYN

SEQ ID NO: 104 - DNA, 736 bp, Mus musculus
tttgcagacgccactgtcgcttttcgccgcttgctgcagccatggtcaaccccactgtgttcttcgacatcatagccgatgacaaacccttggaccgcgtctccttcaagctgttttgcagacaaagttccaaagacagcagaaaactttcgagctctgagcactggagagaaaggatttggctataagggttcctcctttcacagaattattccaggattcatgtgccagggtggtgactttacatgtcataatggcactggcggcaggtccatctacggagagaaatttgaggatgagaacttcatcctgaagcatacaggtcctggcatcttgtccatggcaaatgctggaccaacacaaacggttcccagttttttatctgcactgccaagactgaatggctggatggcaagcatgtggtctttgggaaggtgaaagaaggcatcaacattgtggaagccatggagcgttttgggtccaggaatggcaagaccagcaagaagatcaccatttccgactgtggacaactctaatttcttttgacttgcgggcgttttacccatcaaaccgttccttctgtagctcaggagagcgtccctaccccatctgctcgcaatgtcctgtaatctctgctctcactgaagttctttgggttccatattttcctcattccccttcaagtctagctggattgcaaaattaagtttatgattatgaataaaaactaaataag

SEQ ID NO: 105 - DNA, 736 bp, Mus musculus; identical to SEQ ID NO: 104

SEQ ID NO: 106 - protein, 118 aa, Mus musculus
PMTNPWTDSSCFADKVPKTAENFRALSTGEKGFGYKGSSFHRIIPGFMCQGGDFTCHNGTGGRSIYGEKFEDENFILKHTGPGILSMANAGPTQTVPSFLSALPRLNGWMASMWSLGR

SEQ ID NO: 107 - DNA, 74738 bp, Mus musculus
  misc_feature (1)...(74738): n = A,T,C or G
tgactttgcaccgggagcgcagccgcctggagctgctttctgccaggctggagcgcgcggggctcctgctcttctgcgaacgcaggggccaagggtcggtgacctccgggcgcgccccgttttcgtgtcccctaattcgagccccagcccccggcccgcgccttggcctccagcatggtgctgctggctgggcccgggccggagggcggcgggacacgctgcttgtccccgcagtcgccgacgccaccccgtagcgagcagacaggagaagacccagcggactacgaggagtacgaagacttctctagtctgccggacacccgcagcatcgcatcggacgattccttctaccctcccggaggcgaggaagagtacggctcggtgagcgcggagagcgtcccggagggcgtccctgaggcggcgaccctcctgcgcgccgcctgcgccaacgacgtggggttgctgcgggcgctagtgcggcgcgggccgagttccgaggaggtacgggagactgaccgcaacggccgggtaagtcccgacagggtttgggttccctccgctcttctcccttgcccgcatttccttgtcactccaatcctggatcaactgccgctcagagcaccctttccttcctgtgaggcaattgggaccccatttgccgagcgggcagagatggtccagcccggcttcctacttcatccaggaccctttaccgccccggtatccccgaattctccccagaggaagaattctccgcgctggaaatgtggtgacatctgagatgtgtgtgtgtgtgtgtgtgtgtgtgtgtgtgtgtgtgtgtgtgtggtgtcccttccactcagtgcccctctgactgttacctttccccaggcaccaggtaggcaatggtctctactcactttcaggggacattttcctacccccatccgcatttgtccgctctgcctctcccgctgtctttgcctaacacgttggattaggatttggaagctacagttcctttcattacctaaaccgccctggctttttacgtgcttttcctagtggcccgcgcggcgaccagccagctttatgtgcggtcaccgctcgggtcgaagccaatgagccttcacagccacgcttcaggcaggccgggtgctgcgcagctcagtaggggcacactccagggtcagcacgcggggaagtaaggaggcagtctccgtttattacgccaagattcagagatagtaagaaagtttaaaaaaaaagttggagagctgtttccactgactagtaaatgggaaagtgaccgctgtggccgtgtccccattagtctctgctgggcggacaaacaacctcacctgatttccatgttcccagaggccccgtggtttttttgcagactcagctttgaacaaattagggacgcccgtgcttctgcttgggagtcacagctgacggaaaatatggtgaccccgtgcctttggcttatcctgggggctgtatatgcgcaatgttttgtgcctgattgcagtctgggtcaggcttaggcaagggtgaagccagggtgtcactttctgctttcgataacccgacattgaacttggaggaatgttttgtgcttgtgatgtgacagggagatgggtctggtgaggtcagcaccaccttggtgcccgcggtggctgttccagctggcatgcagcgggaggagaggctcagggggctattgctctgctccactttcagtttaagtaagcgacttttctgggttaggcgctggcgttagaaacctcccccttcctgagcaagccttgtctgcttggaagcgtacacctgtgagtggccgttggccgtccagctttattatactttccggagagaggaaaaaaaatcccaaacgagcaaccacgtttgaaaacagcaagggaaattgagaacgagttaaaccgtgcacagtgcacagcaggcttgtgagtgacagaatgaattccagaacccctgggaagcccctcccaggccctgaggctctggaggacaggtagcagcctccctctgctcttgtttgtcttctgtgtagctcacctgaaacgacagtccctgctgtgtggtttgtgggcctgaaacaccgtcctgccccagagtctggagaagtcccgtacatatgaccatcgcttactgtctgtctcctcatttctctaatttgttgtgaagagattatagtctgatcttgcacccaagctttctcttgctgtttttctcttcccttgattgtgaagatagagtctgaagggcctttgttgttctgctttgagtctctacctctttgcacccatcagatgtccctggggacccctgagggaagagtcctgcctcggcttttttatctctgggtcccagggccaggcctgtgttctgtgtgtcctgcggggacttagggagtgaggtggtatgtggcagaagacattctggtcaggcaggtggggaaccaagggatggtggcaggtggggaatggtttgattgtgacctggagtggagaggagggcccgggggagataaggctagagaggtccactcaggccaggtgacactgtctctagatgggaattgggagtaaaggagtgtcagttggtcagtgccagtctgtagttcttcagtatgtcttccgatgactgtcttccatggctggctttttcaccacctggaggtttctgttttaaggatactttctctcggaggcctttctaccatctcccatctaagcccagagctggctaagggtagtccatctgttgagtctggggtgggggtgggggtgggnnnnnnnnnnnnnnnnnnnnnnnnnnnnnnnnnnnnnnnnnnnnnnnnaagcaggtatccttagagcacaaggaagagactttaggcagagaggcgaaagtccaaaggtcctgaagcaggagcagtgctccaggttcgtcttgctttgtcttaatgaaaatcttagaggcaggccccagagctttggtggaataatagtgggggtgattgcgcgacacagcaggtgactgctgatgggcaactctgctcagggacagctttccaggagcctctaaagcagtgtttctcaacctgtgggtcgtgaccccagtggggaggtgtcggacacccttttacaggggtcacatatcagatatcctgcatatcagacatttgttactataattcatagcagtagcaaaattgcagttatgaagtagcaataaaataacgttacggttgggggtggaggaacaccataccataaagggtcgcagcattaggaaggttgaggaccccagctccataggcttttgaatgttgctgctgcgctgaatagctcacttcttaatagggaagcagtccagcctgagccacagatagctcagagggaccacgtgtgggaactagaggatgtggctgactgagcatctttgcttctgaaacattgttctggaaggatctcaggattcactgtgcaacgtttaagtatttgttacatcattttcctgtaactccgaacatatgctctccccgtgtttttaggtgcaggtggtctggttcctctccttaaaggatggtccctccaggaagtctttccctaacttttttctttgcatgtcaggatgtcgggcttactccttcagtcctggtggctctcccttagttgacagcgaaacggaagacacatttgtggcacctaaatttgtcgtggaacggtagtcagtttgcatgtcggacacctggtcaagctgaaggcctctgtgtgctgaaatcccaggatgttttccaaagtcactgttcacagcaaaccccaccaacgtggggtgcctccccccacgaaaggcttacagctcagtttcacagatactcgggtgtgaacactttaccttgaaatacaattgaggcatctgttgcctattttttaaatgaaggagttatgaatgtagagatcgtgtcttcccaaagtaagatcacagtgttggaattcatgcacagccctctgtcctcccatgcctccgtttgtatggcctgtgtgagcatggagttaggctgattcacagagaactcttgggtcttggccttgaacctccagtgttggccaagggtcagagtacacagggagaggttcaccttgcaatttgggacaatgtgttcagttcatgtgttttctcactccttaatcttgcattccctctgcccctcccccatcctgccatcaggatgtgtgtgtgtgtgtgtgtgtgtgtgtgtgtgtattctcaccacagtgcttgtgtggatgtcagaggtccccaccgtacacctttgagtcagggtctcttattttgcttctgcctatgttaggatgacccacaagctttcagaggttttcctgtgtctgccttccatcttgcagtagaaacactgggactacaggactggaatacaggcacccacacagtgcagcacctggcttgatgtgggacctaggggttcaaacccaggccctgatgcttgtgtggcaaatgctttatccactgaggcgtctccccaggcttgttttagttttatcctccagtgtggggaaggagagaaggtgaaccaaatagcatgtgctaggaactccaaggactgcactagaaatgagtctgctcaagtgggtctgggaacaccgggcttgtcaagccgcccactcttcctcttatctgacgtgagtgtgtccatgctaagagcagtggagaggcacttgtgtattcggtgtaaggatatcagttatctgtgactggtagtgttgtgtatgttagtcagccctgtgtatgtaaaaatacctgtaacatttattatttttttatttggtttttgagatagggtttctttgggcagccttggctgtcctggaactcgctctgtagaccaggctggcctcaacctcacagagatctgcctgcttctgcctcctaaacactgggatcaaatgtgtgtgctaccaaccatccagcagtaataatttatttataagaagatatttgtttgggttcatacttgtgtaacttccaaccctggcctgaacaggcctatcactttgggcctctgggtaccagatggcagtggctgcaagcccagggtgcaggaagctgctcgcatcaaagcagatgtgtcctttgaggacacacacctcaggtgatctaagaacctcagacagggccctgccttctaatggtttgatcatttctttaggaagtaccactttaggaaccagacttttaacccatgggcctttgaagacattatgcaagccagagcaccatgtaactcacacctaggaacaccaggggcttaacagtaacctctctgctgaggatggccaagtctagcctctgaaggtgagatttttcatctgtctgcacctagttggtgagatggtaagaccaggacacctctgtaggtgacccctctctgctcctaggacagctcagcttccagcaagctgttcctgctggctttccgtggcacatgcaggttccaggagggccattttggcccaggtttaattccacttctgcggaaacaaatcataggtcaagcccaggttcatgtggtgaaaatagactttcttctcagtggaggagctgtgtagcgggggataaagaggggggaacaaaacctcttcttgttatgtcagtctaccagagggaagatgagcgagtctaggacaatgatattatacataaccttgtatgtttagctactgagcagtgatatgtgtgtatgtgtgatatgtgtatatgtgcatctatctgtttgagttcatgggaaagtgcttgtggtctacagaggtcatggtctgagggtgaccgtccttgaccattggggttgagcttgctggggctgctctctgttgttttaatgttgtgcaatcagcccctacgtcagcaagatgcccgggactgacttctaggccactgaaacagtctttaaatcagaatccagctcccaggaggctatggtgagggagggagtggttgtttcagaaacaggcaaggggacccaacaagctagctcggcaggtaaaggcacttgctacacaaggctaacaacctaagtttaatcccggaagcgagatcaggctgggaggagagaattcactggggaacattgtcctctgatccttcctgcgtgcatgctgcggtgtgtgcactagtgaaaggtttatcctggctcatgatctcagaggtttcagtccgaagtcactcaggcctgttgttctgggcctgtggctgtacagcacagcatcttgggagcttaagatgggaggctcctcacgtcatagcagtcagtaagccaagagagagaagggctgaggtactatttattatacctcccagtaggctctacctccagaaggttttatcgcatcttggcgatgatacaagctacgtccaagccttcaacacatcaaggggaacctttaatgttcattttataataagatattttcattttatagctggtacaaaacggggctcaaagagccggtaaaaaggctcagaggacagaagcatgtgcccgggactcatgatctgggctgccctctgatttccacatagaagcgctggatgtatattggatgtatgttggatgtatgttggatgtatggctggcaaaggtcttctcccattctgtaggctgcttttccacttgactgactgtttcttttgttctacagaagcctttgagtttcgtgtggtctcgttttccattgttggcctcatttcctgtgtaattggagtcgtacttagaaatccttacctgtgctctaccgtacactgtgtgctgtctcttcaagcagtctcaggttttacgtggagggttttgattcatttgaagttgatttttgtgcattgagagctaagggtctggtttctgtctgctacatgtgaacatccagttttctgacaccatttattgaggctcttgtcttcttttcagcgtgcatctttgtaaagtatcagttggttacagttatgtagaattaaatatgggccttctatctacatgcctgttttttggtgctaataccatgctgtttttttattactataatggtagcataatgggcttgctgaggccttagttgttttgctttggattgttcttagccctcctgtttgatttcttctggaccagtgtttcagcttattggggcagcagttctacatcatagccatgggacttacagaagtcaaaaacaatcccttatttaaaacaacattatttatttactttattaaagacaataagaaaacagaagttgttaaattgagtgaaggcagtgtgtttctttcatgaagtttgggaagtaattcctgtaggtggtcaggtgtgtgtgtgagtgcacacacacacacacacacacacacgcacacacacacacaggatcaccatgtaaccataccattctgacccttcccttagcctcctgatctcggtggaaagagttcagacgagacacacagagtgtggtgtagagaataagtagagtttgttactgagtaacttgtgccattcctagtgggtgaggttgcccagtggccagagagaccattgcagagcagaacactctcaataggtgagcgtggacattggcctgagagactgctgtgtagtgcactctagatggatgagcatgaagagtggctagagaggccattccccaacttatatttcaggtaggtcttgtgccgtttcaaaggtctccggaataaccttcccaatggtcattttctgaccgggtgattgacaggcacacttggattgactcttactggagggagcaatggtatgtaaagtctgttagatagccatcttggaggagtcaggattcctggaaccagggctagataccatcaattggtaaccttccaggaagtccagaatgccatgtctcctccctgggccagagataggattcaggtcccattcttctgactggtcatttgagtcttgctcctgtgcttggttttacaaggtattgattatgagggaggggatcttagccagtgactatcaagtctgctgatacctaactggctgcttagagatactaagaggaagatctgggcagggagtgtgttgggtagaagccacagagagctgggtgacatggggtgaagtggatggatggtggatatgccttcggcctccttgtagctctcaggagcttgtagttagatgaggtaagactaagagtttggggctggagagatggcttgaggtcaggagcacctcctatccttcctcaggacccaagtttggttcccaggacccatgtcacatagatcacaaatgctatgactctggcttcaaaggattcaatgccctcttctggcctccatgggtacccacacatatcacacatacaaacatacacacaaataataaattcttttaaaatgaatattaagaatctttgatgtcattacgtatgtatgtaagaatctttcttttttttttttgttttttgtttttttgagacagggtttctctgtgtagccctggctgtcctggaactcactctgtagaccaggttggcctcgaactcagaaatccgcctgtctctgcctcccaagtgctgggattaaaggcgtgtgccaccactgcccggctgtatgtaagaatcttgaacaaaagttttcaaatggcgttttttaatttaaaggacagttgaaagtgaaatagacttatttctactaagacagagaaaaggaaatggggtagatgtggagtcctttgagacatttggctttgtgggaaattggattggagtggtgggattttagagtaatttctaagtaagaacaaaatcaacacgcaggcttccaaagacatattcgtgccagagccagataagctcatgcccaaagcaggcactggaggggcaggaaatcaggatttctatccatcctcagctggcaattggagactacacctgtcctgggatgtctcagctgagagaggcatagatgggtgtgtggatggcgagatggacggagaggttcatctccttgtgcttgtaggaagtgggaatttaagggtgttaaaattttagtaccacattctccaacaatatgcatttgttgtgcttgtttagttagtgatgctgaagacggagcctagggcctcacacatgctagggaaatgtccttccatgaagttggttagaataaagaagttgggcttcatagtgcaagcctgtaatctcagttactgagaaggctaagacaggaggatcaaaagttcaaagccaggctgggcaacttagtgagggactctaactcaaagtaagaaataaaaaggaggatataaagctgggtgtggtggcgcacacctttaatcccagcaggtgggaggcagaggcaggcggatttctgagttcgaggccagcctggtctacagagtgagttccaggacagccatagctacacagagaaaccctgtctcaaaaaacaaaaacaaaaacaagaaagatagacagacaggaaggaaggaaggaaggaaggaaggaaggaaggaaggaaggaaggaaggatggatacagctcagcagtgcgagctcatgctgcatgagtggagtcctgggttcagtatccagttctgggagttgggagaaagacagagaagttacactgattgaatagagcccattcaagatggtaatactctgtaataatgtggcattagggacagaagaggactcaggcctggagaacaaagagctgctacagaaagataatggagaagccctagggatagagcaattctgctccttgcttgtagtagctgtgggaagacatacgtgggctaaatgtacacagaactaaatacaggcatgcatatacttcccacatgcatgtacacactcacatatgtatgcaatactctcacacacatacatgcaccctttcatgtatgtgtgtacacacccttcacatacatgtaagcacaacccttatgtacatgtatgcacagcacattctcccacagtgcaagcacacacccttacatacatgtatgtacatgccatctcacatacattcatgcacagactccagtacacatatgtatggacacatcttaacacacacacacacacacacacacacacacacacccacacacacacacacatatatatatatatatatatatatatatatatatatatacacatacacttgcacactgcacatgcatgcatacacacatgcacacacacacacacacacacacacacacacacttgcatgtcaggtgacatctgaatgcgtccatgatttgcagcaatgtcgagtttctgggtattactgttacatcattttcaggggagtggcgtcaaggacaaatgttgcagtcctcagagtgcaacttcctgtggtctggttagctatttcaagtggctaatggggctcccctgtgatgtcaccctcccccactttctgcttgaaatttacctttggtgatgtggttggaatgaacctggttcagcgctgtgaccgccaaaaccacgagtgagttataaaagagtgtgggtggcaagagccttcctaagtgcagggtctcaggtctcccaaggctgctgatccacgaagccgtgtcctgggtgctgagggccactctagcccctactgctggatgctgggacagcagatgctgctgatacaggtgccctctacctctggatgtcaccttcatgccatcctcgacagccccagtcactgtggtctttgctgggtgctgtgtcaggttggagcaggagtgaagccacagttgagcccaaatcttccatctttccaacgtgtctttcccgtaccccttcccagatcttccttctggctgcttgcgggaggggatgctcaaagacagttgtgatgttagtttagtaaataggactcttagttcctcctctttccttggcatttctactgtagtggaataactgaagatttttgtagcagatcagatacgcacaggcttcccagcccggcagctacaatagtgcttgttatttcataggagttaaaattaaaggacagatgccagtctctagtgaatgatctggtcaggcaactcaataatatgggtggtttagctgttcaagccatttaccatttgttttttttttttttaaaggtgaagaaggcatgcatttatttttgggcttgctgccacaattaggtttcgttttggaagtggaagcatggtcagagctagtgggcatgtaggaaggggatctgaggctctgtttcctggatcttgtttcctgggtgtcctccatccccactagcccttagctgtcttctaaccagttctaacgactccaatgtttgcattttctttcttaagctgttggtttctttctttctttttcttgtttatttatttattattacttatttgtttttcttgtatgtgtggggcacatgggtaccaggacgcagcatgcaggagtcaattctctccagtttgcgaggtccagagttggaacaggttgccaggcttggcaacaagcgcctttacccactgagtgcctgatcttttgatcttgcttcctgtaggtctgaaatggaaaggcccttgagtttagtactaccctcctgggctgcccannnnnnnnnnnnnnnnnnnntggaagcatggtcagagctagtgggcatgtaggaaggggatctgaggctctgtttcctggatcttgtttcctgggtgtcctccatccccactagcccttagctgtcttctaaccagtgtcttttttttttttttttttttttttttggttttttgagacagggtttctctgtgtagtcctggctgtcctggaactctgtaaaccaggctggcctcaaactcagaaatccgcctgcctctgcctcccgagtgctgggattaaaggcgtgcgccaccaccgcccggcttctaaccagttctaacgactccaatgtttgcattttctttcttaagctgttggtttctttctttctttttcttatttatttatttatttatttattcatttatttattattacttatttgtttttcttgtatgtgtggggcacatgggtaccagggcgcagcatgcaggagtcaattctctccagtttgcgaggtccagagttggaacaggttgccaggcttggcagcaagcgcctttacccactgagtgcctgatcttttgatcttgcttcctgtaggtctgaaatggaaaggcccttaagtttagtactaccctcctgggctgcccaggggaatacataagatccttaaataggaagcatttgtccagtggcagccgctcattcggccgctattgttttctgtgagttatagagaggtcatttcttagtacgctgcattttaactgcattttaacctcgggaaacggcgccaagggttgaagcaaaggtttgaagtggaaaaagctgtgactaaggaaatggaactgggtgtggcagtttacacctgtaatctccggcattcaagaggctgaggcaggaggattgcctgctgggaaactgaaggctacagtgttagatcttgtctcaaaaaaaaaaaaaaaaaaaaaaaagaacaagaaaggaaaaagaaaagggttggaaaagtggggtgtggtggcacgtgttgtgagtgttgtggcacgtgttttagtcccagcacttcggaggaagagatgggagaagcaggaatctggaattcaaggtcaccctctgtggggagccgccctcacattcgccgttgcaagatggcgctgacatcctgtgttctaagtggtaaacaaataatctgcacatgtgccaagggtagttttccaccccatgtgctctgccttccccgtgacgacaactcggccgatgggctgcagccaatcaaggagtaatacgtcctaggcggagaataattctccttaaaaagggacggggtttcgccatccttcccttttgcactcttgctctggctcttgcgctcttgcgctctggctcctaaagatgtaagcaatagagctcttgctctcttgcactcttgctcctgaagatgtaagcaataaagctctctcttgcttttgcccttttgctctcttgctctggctcttgcactctagcgctcttgcgctctggctcctaaagatgtaagcaatagagctcttgctctcttgcttcttgctcctaaagatgtaagcaatagagctcttgcgctcttgcgctctggctcctaaagatgtaagcaatggggggcttgcattcttactcctgaagatgtaagcaataaagttttgccgcagaagattctggtttgctgcgtctttcctggccggtcgagaacgcgtgtaagaaccctctattttacacgcaagtcaaggactctctcaaatcctgttagtaaggccagctgcagggagatgaggaggcagctgcagcacatatctgggcgcacctcgagtctgagagagtggggacagaggtgctgctgtggaaagtggagcagaggcagagggacctggagggactgcagctgtcctgtcagtgacagccacagcctttcttcacctttctcgactacaagtcagagcaaagatgcttgccttgggggcagtggtgctggcccgccctgggcctgatgttggggtcaccagtcagccgaggtgtattccagaagtttcctttagcttcagtgtgggcacagtgctggttctagaagaccccaccctcccactctgctgcttccgtctaaactttcagtgttgctatttgacaattcatgggacaatagtcatccactaaaaatagtgggcagtgaccgggatctccctcttttggctgctggtactagtccccctctccccctccctccttacccccctttggtgtgagaacatgggtgggtttctaggaagtgagttccaggtatgggaaagccggttcactcatccagttaataactgaatccagcttactgaatggttgtgaccttcttgtctctggagtacaaatatctgggcaggccagggacatgtttccagaagttcctaaggccatctgtgggcacagtggaacaaggaaaggagcgactctactacggtgtgtcatcggtgtgccctctcctcaatggtagcctgggctagaccatattgattgtgatggtaggggggaggtgacttacagggcaccagctggacagggcggtccacttacactggtaattgtgtgttggtgtgtgcatgtatgtgtgtgtgtgtgagtgaacacttactgtgtaggtgtatgtggagactcgaggctgttgggaggctattcttcatcactctctatcttaggttttgaggcagggtctctcactgaagtagaagctcccatttctttttgaccggcttagccagtgagccccttcacctctcaacgccaaggttacagatgtacacacacacacacacacacacacacacacacacggctcctgacttttacctgagtgtgggcattcggactcaggttctaatgtgtgcccacactctgcccactgagctaccttccagctctacacggtgctcatgacatgaatgccaccatgcagctggcaggggtgggggtgggacaaagagcagagctgtcttatagggcaggggttgtcttttgagaggtagagagccctggatagagttgtggggggggggcggtcagggcttttagctctggaggtgtccaggaaagtaagtagattctctaagacggttccataaggacacactatggtggcaagttcatactgagctgtgagtcagcttgtggtagggcgagaccctgtctcaaacatagaccaaagggttctatgctcagtgagtaaagtgacttgaggaccccgcacctgtggtatggcaggtatgtgtcggtaaccttggcaactccctgacttgagctggccagccaccctgccgaaattagtgagctcatgttcagggagagaaggactccttatgtcaacctctgacctccacctgcatgtacgcacactcacactcttatacacaccctcacgcgtctacagagatgtgcacacataccacccccagcatcatacaacagagagtaaacagacaaacagaaacccagaggcatcccagtgtgaacctctgcccatcttcagccttttgggctgccctgtggattttagacttggcaggtttcaccatcatgggagccagttccttaaaataaatctctccatgtctgagcctcctattggttccatgtctctggagaacccacactgcttctgccttagcagtaggctctgctggccgagcctccctgtctctggaagctgctggctcagcccagctgccaccctgagggtcacaccaccctgagggtcgccccgacagatcagcaggatagattcctcctgtgggttttctcccagcttctcctgctgcccatgttgttgggtgtggcctgtacagccacaggcctgaatttaccaggacccctgtgtcaatgctgtgctctgacaacctttctgcttccttttcctcccttctcctctccaccacccttcccctttcccctttatttctttgttagagactgaccttcaccgtgtagtccaggttaaccccaaactcatgatctttccgtatcagcttcctgtatgctgggattacagacatataccaccatgcctggtggagtttgcactaaagagcaaatttgcatccaacccctctcatgcccctgctcctggatgtatccctgaaggtagcccacctttcctcatgtccctcaaagtgattccagcatccagcattgtttgatgggcttcacttacatacaccctctctctctgcgctttgatcttaccatcctccacatctggatttgcttccacatgtacaacccttgccaaccagactgtctttggagcctcttccttcaaggctgctgttgcagctgctgccctgccctgcaacattaagcaggaagatggtactagcctgagaaaagacaaactcaaaacacagagcactttgttttgcacataaattacttcaatttaacgatgacttcagaaatctgagacacatcattgtaagtcacgagctgtcattgtttaaatagagtaagatttcccaagcttggcacccctggtgtgtttggccccacaacttttgtgtgaagactgtcttctgcatggtaggatgtttaatattatcctgtagtttctctattagatgatacaataaactctgtccccagtggtgacaaaacagtctggagactgtctggacactgtcatgtgttcgatagagacacagttaccctagggtcaaagcccctaagccagggcagatagcagtgaagctctgtctgggaaggaggtgtttgctctcttctgcctcgtccttagcagcagtctagtcaaatggttcttagttacatagtcattctttttatgatgttctcccttggtgcgctctgctttcttgatctgtggttgtgtgtagcccagggtggcccgagagaccactcttttgaaagttgaagaatataaatacctttgaagaaaactgcctactgggtccttcagaacactcctgttccagcctcctgtaatctgggttcctggtcctccaaacctgactgccttttattctttttcttttaacaacaaaacaaacaaacaaacaaaaccaaaaaaacaaaacaggctctcactatgtagcccagatgacccagttctggatgactcagaactctatgtagaccaggctgccctcaaattcatagagatctgccttcctctgcctcccaagttctgagattaaagattttcactacggcctctggcacacagctatttttttatttggagtctttattgtttgaatatattaatactatattatgttttcctctagggactgtaatagaataaatgaatttgcaaaactctgaattgaggtgcttaggccaaaacctctactcctaattctgtaagttcctctgaatgtctatcctcctcaccctccattatccagtgcctgcagtgagggacaccgaggacaggtggaggcagccagcatgtgctcagtgaggacacaatagctagaagccagagacggcctgcttcgttctactgagactgtgttatctgtgcctaccaagaaaacttcaacgtcactgtatgtgtgtatgagtgtgtgtgtgtatgtgtgagtaagtgtgtgtggatgtgtccagtgtatgagtgtgtgtatatgtgtgtgtgtgagagagggagagggagaaggaagaggaagagagagagagagacagagatacagagagatttacttttcaaataagtaaatccgtgttgggaggttctggcagtaggatgctgagcaggaataggaggttggggtgctgttgggagaggggtgactgcagagatgcctaagtgtgagaatcttgtcctggggatgggcggtgagtgctcagtggaaggagaagcaggccgtggtgggtcttgcaatatttggttcctgtcagaacttctttctctctttgctgaggaagaaaccctcgattaaagactggaatcgaagaacctcccagagctgtttgcaagtctagggaaaagaacaagtaggcaggaggaactggcaggaggggttggactgtgctaaagagatgaggaaggaagccagaggcgctggctggggcagagcagagagggcagagctcaggaacaggggcaggagggaatgactaggcattcgccatggcttttaagctctggctgctgagcagtgacaatgtcaacctacgtaaccactgctgctgtgggatgtatgagggttcagggtatgactctgtgtgtgtgtgtgtgtgtgtgtgtgtgtgtgtgtgtgtgtgtgtgtgtgtgtgtgaatgaggaagtttctcttatcctggtgaaaggaaacgtggaagcaagcccttcacgggcaccgtgacctcttacttcctacagcctgctgcccaaaggcccacctggctgctgagtgcagcaggcatgcctgatgacgaatttcctgggtcctctcagagactctgagctatggcctgtgatgagtaaccatgtggtaggtgaccactggggctcatgaagcagaaaacagagcagtagcctcagtgtgtagcctctgccctgctcctccatccttacttgaagcagaaagggcatcagtctactgcctggccagtccctgtgaagaccttgggttttatgttaacgtggctcgtgatatttctgtcatctgccctcattgctggttgctgctgcttttttgctgtagggtggcagctcggaataacatggctgcatgtggggaggtaaggaagagggcagcattggtgccacagccaatgacccctacatgcttagaaaccgctgtttggatttgatgcagtgttagagtatagtgtgcctcgggtttccatctctgtgcctgatcgtgtgtgtgtgtgtgtgtgtgtgtgtgttctcttaatgtcctaaacactccataagatgacatttagatcaccaaactgctctcctcagtcttttggtgctgaccaagttttgcttcgaggcaccgtaatgcataatttagaaagttgctacccatatcctgtagtcagagccagattcaaatgtcgatctgttctgggtaaatatgggcctttcccggtacatttacatccccaggacattactcatagttcctgatgcttgacttcacagtgcaaatgtgtgctttccccgtgcatttacatgtaccaggacagtattcctgtggtggcttgcttttaactcactagcagtgtgtgcttctctatggagctgggaaacacttttttcttgctcagatgcactggggtggggttggtaagttatgtgaagtcttcactgcaagaaaatgcttccgattttaatgacttgaaagaccttctagcatggtacaagttctttaaatgtatttttttattttatttatgagtacactgtagctgtcttcagacacaccagaagagggcatcggatcccattacagatggctgtgagccaccatgtggttgctgggagttgaactcaggacctctagaagagaagtcagtggttttaaccactgagccatctctccagcctgcgggacaggttctttaggtcatgactcctgaagggccctgtcatgacccgcacctgagcttcattcaaaattaccctactttttgcctgtagtagtctttctccctccccttaaaagtacaggatacaagaacttcccacttatcccatgctcctctgctgccaaggccttactgaggtctgctgggagtgccttctaaattattcctcttttccctcttnnnnnnnnnnnnnnnnnnnnnnnnnnnnnnnnnnnnnnnnnnnnnnnnnnnnnnnnnnnnnnnnnnnnnnnnnnnnnnnnnnnnnnnnnnnnnnnnnnnnnnnnnnnnnnnnnnnnnnnnnnnnnnnnnnnnnnnnnnnnnnnnnnnnnnnnnnnnnnnnnnnnnnnnnnnnnnnnnnnnnnnnnnnnnnnnnnnnnnnnnnnnnnnnnnnnnnntctggtgtgtctgaagagagcgacagtgtagactccatcatcaccttgcatggactgaccaagacagtacacgtgacaaacagccgcccaggaaacaaagctcaccaagcttaccacgactttgcttattgtcatgactcttcatgactttcacgaccaaaactgcctcagtgtctgccttctctcccgctcctgcctcattaccttaaccaccaccctccaaagctgtctactttcatggtgtagaaagagaaagccctgtcctttcagccccctgtgcccaccactccatctttaaacctggtgagcctgcatacagccagagattccaagatgtgccatgtgcttgccctaaatgatccaggtccgttcagtcaaaccacccagtgacactctggatcccagctttttccagggtggctccttccttctcactgaccctgcaagggcgtgccaccctctgggtctgtgagcaacaaactcaaccttctcacagtccttgctggaatctcttccgttccctctcccgactgcatccaatttgttcaagattttacttaagggatccgagtgtctcttagctcctgctcgtacttatttttttttttttcttgtctgaccattttttcgaggttaaccaatcatcccttttgcttcttttctccttggcctaatcttctattggtttttaaattccttttaaaaaaatgtttcttgactgatacacaaaacatccaaattatacacaattaagaggaatgttttgatacgtgcatgtagtgtgtgatgttcaagactgggtaagttaatgtctcctcaaatagatgtcacaccttttatgacaaatactttcaagctattttcttctggctttttgaaaagcacagtgcctgactatagttgtagtcaccccactgagcaacaggccctgaactgcttattcctgctatctcaggacccactgacacactgacacagctctccccagccctcccacccccctttgaaattcttaccctcacttaatgttttatttataacatcttcctccattgcctctttatgggcttatagctttcaaaacttactttaataagtgtactgaaatgctctaacctcccttctagcccaccgcccaccagaggtagtgggaaggaaaggttactagggcaaaggaggatgtggacctgtttggaaatagttctcttcttctttttctctgtcttcttcctttatttccccttctcccagtactctagaaccttgtgcatgctgacaaacactcaatgttaaggtgtcttcccagcctttatttggttcttctcttctcttcctcttctcttctcttctcttctcttctcttctcttctcttctcttctcttctcttctcttctcttctcttctcttctctcctctcnnnnnnnnnnnnnnnnnnnncagggtctttacggtctttatgtcgattcatttggggccttaagatccagccttatttttcttacatggccgggagtgtttgcccaccaccagcaattaaataacatgctctctgtggagttctgaaatggcgtctttattgttcagtatttgatattgcaataatggtttaatttaccttctctgcctgctgatgggtgtgaagctcacgggtgctcgttagctctttgctggtctggggaggtcctgttctttcctctccccatttggataattataattataatatcataattatactattggtacttcagactgatgtctaatacattactgtaccattcattttggttgctgttttccaacagccttttagctttgcttgtgatgtttagcagcaagggaatgctgtatttaagtgtgtctagtacacttacatatgtatgtatttcattctttctgtgctccccaaatgcttctttgtcttttgattaataaaatgttttaggatgaatgtatatatgtacatacatacacctttatttttgtccttaattttttatgttcgttcttttgtttgtttttgtgggaagggccaggatgcaagccatggcgtgtgtgtgtgtgtgtgtgtgtgtgtgtgtgtgtgtgtgtgtaggtcaaaggaaaacctgcagccactccattctatttttatatcctatgtatcctggagatggaactttagtggccagccttggcagcaagcgctctttgaggaaccgttttcctgggctccttaactcccaccccctccaccccccctgctttgtgttctgaggcaagattttactctgtagtccctgctggtccagaaattaccacgtagcccggactgggctttaaagtacagtgcagcttgtcaaatgttaggatttgaggcatgagttcccatgctcggtgagtgtgtgtggcgggtgggcctgtcgagacatgttgtcgatttttatcttgggctacccttaagatctcaatctgctgcctcctgctgaggtctgggtttgcaggcgagtgccaccaccacacctggctttagtcatgtgttttaattgcttggttattaacttgcccaacaaagttgtttgtgtattctttccattatcctggcatttctttaatgcttaactgctaaggacaaagggttatctctggttcgtctgctctacctgtatccccattatttgtattctcactcccgtgttttgttttccgctcttattttgctgaagtatcagacacacacatttagaaaaccatttagaagcccgagagcttgcaacgaattgtggtggttttctccccagaccgcttgcctggctgctgcccagagtgatggatcactttccactctattcgcttccactttcattccatctggccaggaccggcgctcttctggctgggaacttgctcactcatgatgagtcttgatttatcagttcagggtgatgttcacgactcactgttgtggcagatggagatttttgttcctatccctcattttcctccttttgagtcagacctagccagccatctgcatcatttgcatgtattattctcattccttgtatggcgggcatgcttgcgtgcgtgcgtgcttgcgtgagtgcgtaggtgcgtacgtgggtgcctgcgtgcttgcgtgcttgcgtatttggaacaggttttcactctgtagcccaggttggcctcaaacttgagctccgctggcctcagattgtagatgtctaccaccatgcccacccttgcctgttttattttgacctcagctccatacctttcacttctggctcttgtttctcagcttttcctcgcgcccccagccccctcactacccacttctccttctgtcttcaattctttctgcagacaagattaatggcattttcttgactttgtaactatactatgatctcaactttctagtttgatttcacaaactgaaaatgagtaaatttgtgttgtcattttgtactgttgttgtaacgcagaattgacttggtgaagcgtcacctggtgagacaggatcactcttctttcagtgtggtgacttgttttacgctatctcggcctatctttttactccgtctttatccgtttttggtggtgaagccttagctatttattaacttattattctttacaaaacaaaaagcaaaactagtgttccccagccccaccctggcagcttcctttaggcactgctccaggtattcggaaccaatactctgaggcatatgatcaacctccatgcatctgagtctagagggatctaaggggcaagcgcactaagtgttgcagctgcagccaaggtgactctgagcagccggaaggaggtgacaagggtctctcagtaagtcacagacggcaagcgttcttctactgtctgcttgtgggtgaatgattcttgcataaaattctctacatcgtgaggatcttagcttaaacgattggcctggaacttcctgagccccgctgcctcccagcgctacatctagaatcctaagctctgggatggcttcttcctgatcttgttgtggcatctctttaaagatttgtttatttactgtgtgcacgtgtgtgtgctagtcatggcgcttaggtgaaggtcagaggacaactcaggtcagcagacttggcagcaagccctttaagccgctgaaccctggaatccctgctgctgtgcattgccccatggcctcctcttcattttcctttagtcggtttaaagcagcagcaaacatttgcaaagtgtttgctctgtgtgtttgcttagtcagctgcattgtccctcttggtatgagcttacccagccttccggtcgctggaagaagaaaaggtacccaaatgacaagggctttcagtacaggtctgcatggcacagtcagattttattttaggttttgcaagtgtgccaaacaaatacctacttttacaacaggtgccactgatggggtgtgactgaggctgacaggaccccacttccctccagggatggaagctgcagaatggcccctttctttctttatacctgtcaagtaaattgctgtgtgtgtgtgtgtgtgtgtgtgtgtgtgtataactaatgttcatcttttttggtttattttatgcataactgatatccttctatatatttgagctgatcagtttatatctacttgggtttgatatttatattacccacgaggaaaaagaaatgtctttgattaaaaaaacagggtacaatgttttggatgtctactagaaacttagtaaaattcctagggtctaaatcactttctctctcacaagatctttttacaaagcttggaatctgcatattgatacaaagaaagagtaaaagcagctgtcagatgcagccctgtgagataatgagagaaacacacctgcctccaggtttgcagcgagggaagtctcagttactccccaatagctttaccagggtactcagggagcaggtgtgtccactcagttaatgctcttgaaagagttgggattcctggcttctttctgggccagtctctcaactcccttgtgtctccagctcaggccccccatcttactcaccttgagaccccagattctatcccctgctgcctcctccagtcaccctccaccctggcacacacctgactctgacagactaccagcagttgtgccagcagtcctatgaagtcatctgtacccactctgtgtgctccccgtgctgatctcacccagtcttagccgctctgggttcctagaatccggttgtgtgaactcctttcctgtctcctcattttctgccaagaagtcattctttttggcttcctgccttacattgctcaatagaagaaccatctctagggacgtcaggagccctcacattccctgtgactccccaagatcttccagagctcgtgcgcatgagttactgcactgaaaggacttataaacacaggattgaaattgcttttcaaaactgctgtcgttagacgtgccctccctcactgaggcatgagaaacagagtttgcaggccacagggaagagaactgctgctcccactgagaagggaacccccccccccccatagttctgaggtagtcactcaccatttggtctgacagctttgttcttggaggggacatctagacaaattacctgtcattgtcacccggctgtcacccctgtgaaccacatgagagctgctcatcaccagtgagtcagtttcctgagacctgagtcctggtccttgaatgggaggggctatagagaaggcctaagctacaatgggggactcagcagcaggagctgagccatggtctggaatgggtgtttcctaagtgggaaatggggcaagggtgacaccctgagcatgatgggagtcaggggaggaagtcagaaggcagtactggccttgtgctgggttggggaggggtgctggtttcagactggatgggtcctactcccacagttcagaagtctggaagtcaggaatccaggagatggcagagccatgctccctgtctctgatgtgtggcttttgtgcctcttcttgtccctcgcatagccaggcactcctgggtgtataatgatattgctctaagcataacccccattttcatgtactcttttctctgtctcctgggtggccccttaagatctttagatttttatccacaagtgtactatttccaaataagatcacattcatatacaccaagaattaagatgcgcccccaccctgtatgaatctctattttgaaacagcatctcgtcagaaagcccatgttagcctcgaacttggaaccctcctgcatttgcttctccaagcctaaggctgccatttgtgtcgttacaccctactcactgcaaatgtctttttggggtgtgcaattcattctgttttagatagtaatagctgaaggagagggatcaaggctcagaatactgtgtggcagggtgtgctgagcctccctcagggatctgcatgctttcctgagaatggaccatcacttgtgagtccctacgctgacactcccctgtcttttctggtcacagccttctggatgattctgactctggaagtcaccagcgctttcctcttgaatgaatgatgtcctgtctaaagctgaatagctgggaggcgaggagcaccttcttggagggggaagggttttcttagagaattaaatgtagggctcggcagagctgctgtggccggctggctcaggagttggtgactccggcttggttgtccccgaggcatctattgttcctggaatagctggacaatctgttccaggcaaggaagaaaacacaccaaagcaataggatgacttcgttatgagtgcagttgtaatcccagcatcctttgcaagtaattacacttgcagtcatgaacccgaacctcagcttggtgctaatatgaacctatccttccaattgatatatgttgagcgtgcacatgggtattgttctaaannnnnnnnnnnnnnnnnnnnnnnnnnnnnnnnnnnnnnnnnnnnnnnnnnnnnnnnnnnnnnnnnnnnnnnnnnnnnnnnnnnnnnnnnnnnnnnnnnnnnnnnnnnnnnnnnnnnnnnnnnnnnnnntttccttcttcaggcgcccaatcagaggtagatctttctgcttctcctcagccttgctcactccctcatgcttctctccctgtagttgctttctttccaccctggggagatgctgctttctcattcagtggctacagtgctcttagctccagcttgtggccctgccctccagcactgcagtgcttggtctgccctaccctgtgttatgttaacagtgctttgtgaaggtgtcactaatgtgtggtatggcagagcgtgtacattctagcagctggatgattttcaacaggtttggcagtacactccgagcgtaggtatgccctctgaaaatgagttgtcaggtggtgtaccggaaccacatattgtgttcctgaaagccgaggtggtcttgtggtgcaagtaaaaacaaccataacagaacatcctgttttaccaaaaaattcttttttgctagtaaaaggatgtatgaagcacagtcgtcagagctttagaggtagctcagtctctgaatttgatctccagaacccacaataggaaaagccagctgtggtggcgggcgcttgtaatcctgacattgtggggtggagacgaagtagttcccttgttctcatacaccagccagctattctactcaatgaattacaggccagtgagagaccctgcctctaaagacagagtggttgctgtnnnnnnnnnnnnnnnnnnnntggttgctgtctgagaatgacccagaggttgacacctgttctctataaacgtgcacaatatttgtttggacacctgtacatatgcaatttcacgttcacgaacacacacgtatgtgtactcatataaacacatatacaaaaaaagaaaattatgaaaggtataagataggaaatgcacaacccaggagcatacatactatcagatataatgggccgaatatcacctatgtgctatgatctcacatgactgtcagcacagtaaattacaatcagttcatccacggtgggacatcatgatggctgtgaggtctgtgggcagcaggaagttcaatggtcatctgacatgtgtgacacatcaacaaccagatgctacgtatgtggctgcatctgcacctgtatggtcatctcccactccaagattcaggtctccatctccagtccgcttccttttgcccactttctagtgagtccctgtccatcagagatagccactacataggttgttttaaatccggggatcagtagaacccaggtggagcctcagtagaatcacacagtcttgtcccgtgcccagctttcttcattcatttcaaagggttttgagatttgtctgtgtatctcttaaattgcctttttctttgcatttctttatgttttattttttaagatgtttgtgggtagctgggtggtggtggcggcggcgcacgcctttaatcccagcacttgggaggcagaggcaggcagaattctgagtttgaggccagcctggtctacaaagtgagttccaggacagccaggacaacaccaagaaaccctgtctcaaaaaaccaaaaaaaaacaacaacaaaaaagatgtgtgtgtgtgtgtgtgtgtgtgtgtgtgtgtgtgcgggagcccacagaatccaaagatagaatctgcattgtacctgacatgggtgctgggaacccagcttccgtccttgccagagcaatagttccaatctactgatcctagtcgccagccctcttcttttttaacagctgcagggacctgttagttcccctgtttgaactgccccctatgtcattgtttttaaaagttgtggtgagtgtatgtaacaaaactatctcctttagccactgttgcaagagtgcagtttcgtgacattgatgactttcacaatgctatgtaactaccaccactgtttccaaagctttagcactagaaacaacccctgtaacctcgaagacatcaccaattctgtcttcccccagtcccggctctctagcctactctgatttgcttactctgtgtttcacataaacagactgtagtggtttgaatgagcaatggtatcacgctcctcaggtcaagtgattggatgagcaatcctgccacgcccctcaggtcaggtgatgaatgaacaatcccactcccctcctcaggtcaggtgtttgagcacttgtcactagttgattgtgctgtttgaggaggtcaccagaccgttaggatgtaccgtcttgctggaaggaagacagcactgggcgtgggctttgatagtttatagctcactacatttgcagttagctctcccagctttctgtgtgacaaaatgtgaccaaccgtcttgctcctggcgcccactgccatgtttttcttgccattatggactccccctttggaaccataaaccaacaaaaaccctaactttgagtctttgttgttgctgtcttgtttttgttttgttttgttttttggttgcaaattattttaccccagcaatgaaaaatgcacatggggatatatgtgcccctctgtgcctggcttatgtcacttgcacactattctccaggttcatgtatgctgtggcatgtattggagttccatttcctcatagagtggagaaagagtcttgtgtgtgtgtgtgtgtgtacaccacacgttgcttatccatttgctgacgccttgggtgtttgagttattgtgagcaaggcagctgtgaacacgagtgcccaggtctctcctggaatccctgctttgaacctcctcagatgagtacttcagactggtacaactgagttatatggcagcaagccctcccgggggtttggctggttcagtggaatatttgaaatccgtcagtgttgttgcgtgtagcatattttcttcgtctattgttaaagctgtttcctacatttgtgtatgtgcaggtttactcacttgattcccctttcacctttcttccttcctgtcgccccctnnnnnnnnnnnnnnnnnnnnggtgatgaacatctacactgtttgtcatttggggctgtgagttatgaatcaggctcccgatgttcttgtatccgtcttaatttgggtacagatattctttctctggagcgtgtctctgagtggcactgctgtgtcatgaggcaggcacatgctaagctttaacagagactggcttcccagtggtgttcacacccccgtctgctgggaacatgcgcgccccacacccttgccaacatttggtattgtcagtctttttaattttagcctctctggtgggtgtgcgctgctgtctctttgcgggtttgatttgcatctccccggtgactcaggatattgaacaccttcacatttgaaaaaaaaggttataatttaaattcttttacataaagaaagcgcattaggagacattaacgaacacctgtaagcacagacattccaaagcccagaatgtctcatcgaagtcatctaccctgacagctatgagtcagacagacagatgtccgtttcagttacgtctgaaatcacaaatgaggcagcagcctgggtttttgttttttgttttttttgttttaaagcagacaggagcatgtatttaaaaactattttaaaaataaaagaaaatagaaggctatctttcctcctcacctcccattggagagccaggctttcagggggaaagtctaattgcactccatgctgggaggaccgtactgtggttctccctgacttagcctcggccctgattgtgaaccaccttgacctggaggcttctctgcaattgtgacatgatcctatccttcctgcctaagaagtttctgcctgctctgtgccaacccctctcaaagcatggctggtttccacctgctgtgcaccacccgctgtcccctgagtcacctcacattgcattgtttacttcctgggctccttccctagacccagtttccccagaggaaggaccacacacacacacacacacacacacacattttctgggttcctcttcctatttctacacactactagggcctagctggtgaccagtccctgcttgtagggtagtgtatggagacggttctagaggcagtgtgacacccctcccaggagctgattttctgtgtatatttgtctagctactcagtcttaggagatagaactatacctatgtattcttaaatctagaagacaaaatacaagccaccatttcctgacctttcttcatgaccttttgccctgttggccacagggctatcatttgctctcagtgatgtagcctgcttgctggtagtatcatgtaggaggcatttgagggtgactgtgggtctgtagattggaaataggtaagaatttattaggatataccatgagaaagacaggaccaggcaagagagtagatgtgcctcttcactaaaattaaacagagcacagttaaaggaaaacaaaggaaggtgcaggggactgtgcctggtgttgctgaaggagaagtgtgtggatttgggttcccgggcagtgcgagcatcttcactgcccggccgagagccttctcgctcacccagcattcttgcctgcatcttctggcctcatgtcctttcacttctcggctgagagcctcattcaccccacagccctgtcccatctcttcctgcctcaggtcccacaggccacttgggagcttattaaagaatgtatgctctgactctgggggccggggctgaggcctgaggtgtgtctttctctccagctcctggcaacactgatgctatcggtccagagacctcccttgagtggctggagcagagcgtgaatccaactgggttagtctgagggactcatcagccaccttgttcattctccaccctttgcgttggttgtgttgaatcctgccgcccatcatctagtataaaccagcctggtgcatccagctcggtatttgtgaagatattgtctttcaaaaagttgtggggagactgggagattgtttaaggtattacgcgcttgccaggcaagcataaggacctgaggtgggatttccagcactcgcctcaaaatgtcaggagctctggagtctggggcaagtaacagatgggccccaagggtttattgaccaggcagattagctaatcggtgagtatccggttcagtgaaaagacacggtgccaaaaataagttggggacaggctgacttagacctcagtcgctagtctccatgtatacatacatgtgtgtgtgcacatgcgcttatcacacacaggcgcatgcaccgatgtacacatagagacgaccatacacagacacactaagtagactgagttgatgtctgagggcctgcagataaagaaatgggaaatgcttgcagatagcccaatgtgttctatgtgttcaaaggggtttaattctttgagtctgacactactgggcaatttaggttcctatattgaattgtatggagtttttttcttcccccagaagtccataaagttgatcataagctatagcctttgagaggttcagtttcttgttcccttattggttgacggctggtgtggtaagcttatcaggaccgcccctctattttctgtggaacaaaaggcagctttctctctcttgtagtgtgtcttcacaactcatgcacttactaaaggcatgccatgaggagctttgctgaaggttttgttttcttaaataagtttctgattattaaacaggaccaaccattcattactgaagaatgaggcttactactattgaagaaaaatgacatcattcagaccagtcatgctgaaatcctggggattttcttcctggtccccccaccccctgttgaattgttaacacttaatttttcagttgttgggctggtgagatggctcagtgggtaagagcacccgactgctcttccgaaggtccagagttcaaatcccagcaaccacatggtggctcacaaccacccgtaacgagatctgaagccctcttctggtgtgtctgaagacagctatggtgtacttacatgtaataaataaataaatctttaaaaaattttttttcagttgtttttagaaaagcttacttgtttttactttattttactatttaatgctctcttcatgattaaatttcttcatacatatcattttaaatgcttaatgaagtcatacaatagaaaaattgttccttaactctttgttctagtttaaaaagaactttttttgagagggggcaggaaccagcattgatctcatgtcttctaagcatataacaaatcctggttgaagcctagagggaaatttccaagctaagtagcattaattatatgtagttagccacaattaatataacttccagtaattttttcatggctattgacatgacaacgatcatcctgtattttagtatgttggttacttctcttaccaagtactaccaagtgcccaacaagaagcaacttaaagtgaaagacttttggttcatggttcagggatgccacgcctctagtcagggatgggctgacagagggaccaggtcatgcctagtgttgggagctgcttgctcacatctgggcagatgaaaggatgggtggaattcagctggagttttccttttaattcagcctggaaccctagttcatgggagggtaccacttagggtagaccatcacctctcagttaaacctccctggaaaaacttgacgtacaaagccccgaggtagatgctagtaatgccctcggccagtgtgtctcaacctgtgggtcactattcctttggggaattgaaggactctttcacaggggtctcctaagaccattggaaaacacagatatttatattatgattcataacagtggcacattataagtatgaagaaccaacagaaataattttatggttgggggtcaccacaacatgaggaactgtgttaaagggtagcagcattgggaaggttgagaaccgctaccctagtcatctcttaatccaaccaggttgccggtaaggttcatcatcccaagcttacctctggtcaacttgacacccaaatgtatcacctcaagttgtaaccatcaagcccagggctccagattcgtaagtggatcccaatacagcaggcattagtccatctctagagtccccacagtcttagcgtcctaacttgttacaaaactcaaagttcaaagtcatcccaaagactcaaaatagtctcttagctgtcagctctatgagcatcaagagcgagttagatactgctatgttttcagtgtgaaatatctccataggcctccataagttcccaaccttcctaactctgccacccttaaattacagtttcgcacgttgtgcggataccccccaaccataaaattattttcattgctatttcataacggcaattttgctacagttatgaatcgtaatgtaaatatctgtttttctatggttttaggcaattccggtgaaagagtcatttgatactgccccccccccaaccttcctccaccctcccacttccatgcccaaagaggtcatgacccataggttgaaaactgctaccatagtctttttgtttgagatagagtctcactatgtagccctggctggcctgggactcactatgaagaccaggctaacctgggactcacatctgcctgcctctgtctcctgcatgctggagtgaaaggtggaaagatgtgcggtgcctggtttgtgggctctttgttttggctcgtggtctccggctgtagtactttgaggtataacctcactggaagaagtgggtttctggggcccaggctttgaggttttagagcttggctctacttcctgtcttctttctgctttcggactgaaggtacaatgtgagaagctgtctcctgctgacgtcagggctcccccaccagagctgattgtaccccttactcaactgacagggggaaacaaagctttcctctgaggtggattattgtcaggtatttagttacagtgaaaagagaagtgactgatacacacacttccaggatacagaggtacagagtaagcattcctgttccagaaggggggtggggcagaagcttagcaagacctcgaatatgaaactccatgtttgtcattcatggctcatggtggcatcatctgggctccagcgggcttgagtggccctgtctctcagactctgttgcttgggtcacatggggcctctctcttgaggcactccagttgtgtctgtgtcttgcctcatgaatgtcctcatgaagtagctggtatcctggatatctttggtatattgtggtatctcctgtaactttgagatacttctgagaatattgagtgttacttgggtcagagagaaacactgggcagtgttttttgcttccagctacttgctttgctgctaggttcagtggattcctcttgtttatagagtgtcagtattaagtcagtgactctgaacagtggcttcctttgtccttccctaagaaatgcagagattcctattgctggcagtgtgggctgtcctctcagggcctacagcctggtgcttggtaaaatttactctttctactcctaatgtgatttgatttaaaaaacaaaaaacaaaatcctaaacctggttactgtcttagtctgtctgtaataaacttagtgtacattgagtatcatataatcaatggaagtgtgattggctttgggaagccaggaagccttgatcctctagatcaaggagctgtgtccagcagagcctttcttgctgtgttactctgtggcagaatgaagaagtgttaaagagcctacatgcttgagcaagcaagaactgagtttgctgtctgaggctctttatataactagcactaatccacacgtgagggtgactcactcggcaccaccactttggacattaactttccaacccagtcaaaccttagcaattctgaagtagtgtaagagccaggagattcaacgccacagtgtgaagttaggatcgttcagggaccaggagagcttggtggttgatgggagggaccaagccccaaagggcacactgatatgcctgagtgcagtgttactgagcaggggagatagattttgttcacaatttgtggtaatggaaaaattagacctctataaagtatctatcacctatagaaactaaggcaatagtggattaaagacctaaaaatgaaataggaaaccctggtagccaaggagctaaagggatctgcaaccctataggtggaacaacattatgaactaaccagtaccccggagctcttgactctagctgcatatgtatcaaaagatggcctagtcggccatcactggaaagagaggcccattggacacgcaaactttatatgccccagtacaggggaacgccagggccaaaaagggggagtgggtnnnnnnnnnnnnnnnnnnnnnnnnnnnnnnnnnnnnnnnnnnnnnnnnnnnnnnnnnnnnnnnnnnnnnaaataggaaaccctgaaacttcccaggttaaatatgagtatctctggtactttaatagaaaggcggtgatttgtttaagtctttttttccttttaaatgtatgagtgctctgcctgcatgtacatctgcatgccagaagaaagcatctgatcccattacagatggctgtgagccaccatgtggctgctgggaattgaactcaggacctgtggaagagcagccaatgctcttcactgctgagccatatctccagccctgaggtgttttaattttattttttgttaagttctcatgtaactgaggctggccttgaactcctgatcctcctgtgtacccaatttgagtactagaatgagagcaatataagaccatgctcaaccagaaggggtttctcatttttgtgttgaaaaaaattattgttgcaagcatgtgtgtgtgtgtgtgtgtgtgtgcgtgcgttcgtgcacacatgtgtgtgtatggtgcatgaatcacatggcacatatgtggcggtcaggggacaactttgtggagtcagttctctccttccacccgtgcgtgggttctggagatcaaactcaggtcgtcagggtttcctggcaagtgcctttactccctgatccatgtctccagcccaggcaggatttctgaagtcacaaaaggcattaccataatggaaagcactaactattttattgcatcaaaatgaaaactttgatggcaaaattgaaagtaagtaggaagcaaggaaggtaggtatctcccttccttccgagctaattgctgctgaaatggaaatatttcggatatgttgggttaaataaaagacactgttaggataattgcttttattaatagggccatcagaacattttatacgacattcattgatgacacccattctatatctcttggacagtgctgactttgaatacataaagaacttagtctgatcaacgaggaaaaggcgaagaagccggaaggatataaacacgctgcttattagagcagaaatgtagatggctgatggacagcgaagatggtcaatcttactctaaattggggcattgcaaactaagatcacaataacgtgggaacccccgcatcgcttcagccaagacaggatttaaactagttaaagaggattttttaaaaaaactactttttattctttgagaatttcagacatgtttacgatgtatattatggtatccacctctgtagttcctcccaccttgcctactttacacccatcccaacttcctgttcttttctttcacataaccccctgagctgcctcatgtgtatagatgtcgggccatctgcagggcataggcagcccacgaaggcccacagccttggagaaagctgaatctcccccttcagccttcagttaccagtagctcctccgctggcaactgagacgctcaggagcaactcccccgttcattctggaacgtggactagaattttaaatgtggatatgctggtcatttggactagtccccaagaagataggggacttgattttgcatagtcaccaaagccaggggggtggggtgggggggggggtgaaatgagcaagggagcgagcgagcgacactgcttcctgtctcctgctgtctccagaacccccagctttagtcatctctttttctctcacacagtcttcatttctgaccaaacatcttgctcacaccatcagggtgccatcgtctgaagcctggttcctgttctgaactcttcctcaggtggtgggtgggacagacccctcagtagtaggattgcagtgacactggtcccaggagaagggctgggtgaagacccagggaccccaagagtcatacaacctcctgtggaacgggagtatttacaggaggagggtcctgtcagggtggcaactgcagctactgcttagggcttttctcaagagcggttgggctgtgtgtgcgttctcagtctctatctgttcttaaatccacacatgctgcatggatgtctcccaagagcattaggacccaagtgcagcacgccttaggcccccaggctttggcagggtctatacactgctaagaggggaacagaaagggttttgttcagtgactgtgaagtgacaattctaagagttgctttcagaggggcttttgtggatataagaaaaactgtatgcatgcatgtgcgtgcatgcatgtaatcacacaaggaggacgttatggtgtgttcagtcaattgttagagcaatgtgttcacccagcgatgttcaggaggagtttgggtgttcccacaatgagctgagagcactctgtctgtttgtgcaaccgtgagctgacagttgagctaggagaacggagaagttggtgcagtgtcctgggctcttgctccttaaaattcaagaactgcaaaaaagttttaccttatatatggatgatctgcttcaaaaacccccactaactggagggtatcaggtagtctttatggagttgattgtgctgtcttgtggacgtcagtttagaacaacccatatcattccttcgaaacatgtgggcacatgatctagtctctgttgcagtagtaataagtcagtggtttctacccccaccttagaccattcagttctcaggtaaaagacacagaacttttatatttataattagcctttaaagcagcagagctggacagatatctaccctctaagtattagtatctacttctctatcaataaccccaagatatgacttgctatgttctgtctaggccactgttagaacaactggctatctctcatggccagttctcaggatcctttgccccatggtgtcttctcctccctccactctcactcttctctctcttgtggtcctccaagccctgggactgaaaccccaccaacttctctgctgcccagctataggctgtcagcatctttatccagccaatagttctaaattaaggagcaaggtcacatagcaccacttggtgtccatgaggattctcttgtccccatggtaaccatttcttaggggccagtattttagcattataatacatagcaaaagaccaaactttaacaagtactcttttgacagggcgattaattatgacaacgggaaaggtaccatatggaagctcattttttttctgtacttttgagtcatttttgccctgtagctcaagctggctttgtgtttgagatcccgctacctccgccccctgagtgttgagattacagctgtatgccaccatgcccaactcgtaagtgatacttgtattggagatctggttgtgctggtcccctgtgggagtactctgaacttaagcttgtaccctctgtgtagcagagcatgcaccagctgtgctgaaagaggcttactcaccaaaccttgctctcgagagcccatattagctgaccattaacatctccttaagcgtgcgtgtcagagaaggtaaccctgggtcttggctataataagtgttttggccagctgaggttgctgtaacaaaaccccgtggacagtgtggtttatgaacaatgagaatttatttcttgcagttttgtagccagaggtcagggttccagcaaggctaggttctaatgaggggcctcttcgggtctctgtctttgaatgctgagaaagaacctggagagctgtctgaggtccctattctgtaggcactaatctcattcatgatagttccagcctcataatatgtcacctctcaaaggtcccacatcctaatgccagcgctctgttggtcaagagtccatgggtgacaaggacacaggaggacacaggcagtctgtctatagcaccagaccctccaggtaaagcctctggggtcaaagaggtgactccttgccttggatctcatgtttgttctttgagtcatctacttaattaatacatttctcaaaattgtggtgtgtgtgtgtgtgtgtgttaggatgtcttgtctggatgtttcgcgtctgcattcccaataggcagcatggaattcctactctcttctatttctgatttgatctactagttttgtaatttctcagacacacaagagagtatcactgagtcccaaaattcgggtggggctggatgcgggtggggctggatgcgggtggggctggatgcagctgctcacacatcctggtctctgtgtcttcaccttttttggtggaaggtgcctcctcaggcttcagcaacagccgttctcctccataggtcacaatggctgcttagaccctggctctcctaatgaccccaccactagccagagccaaaagcaatgttcgtgccgcagcttctcaacctctcttgtttctcactgggcctcttaggtcacatgacttttctggaactcatctgggtgaggaggtgattgccttagaagctagggtggggctgggtgggagggggcttgggggacagcttactcttatgggaatgcgcaggggtgaccaggtacatgaattccctggagaataactgtgctaagtggacttgaaaggacaaattctggaggctgcaagcatccgcactaaaactcttgtccaattttctcctgtgacgaagtgatcaaagccattcagaggtgggccctctcctgtaccatggtggtcactgccacagccctagaagagagcaagcacggaggtacacctcatctttcccaggttaattatggccttgcattagcttcaagcatcagggagacattgtcctgcagcttggaggcacagcactctgggtgataaattactctgggaaggagagcactctgggagggagtcctgtcctgactttgagtcctttgggcatgtactcagtacagctgggccagatggtgtctctgtttttttgtttctgtgaggaacttctgcaccatgttcatagtggctgtactagtttacattcctactggcaatggagaaagttcttattattatgcattcttttgttgttgttgttttctgtttgtttttgtttttccgagacagggcttctctgtatagccctggctgccctggaacttgctctgtagaccaggcttgtgtctacaatgtcagagatccaccacccgatgcctctggagtgcagagattaaagataatgtgctaccaccacccagcttgtatgcttttgataatttggcagatatttgattagtaatctccaaaattgaccatctctctgcatggacctctccctgctgccatagagcactctcctctcagtagcagtgttctctgatctgcatggctggttcctaaaatccttgctctgcccaaagccacctcctcatctgatggtggacatacctactcagttgcttagggtacggctttggggtcttcttggttcttctgtttttctcacacaccccaggtccattcctttatgagataccagaatccaaacatatctcctacccaaggctccaccctgagtcactgtcacctgctcagcttccacagcacatgtgtctctggaaccactctctgcctcaccaactgttcaaagtgctctgggtgcttcatggccctgtgggcttgggtaccactctctcagttcactctgacccagtctctgggccccctgggaatcccctgatggacaagtccagatctggctttgcttctgctgtttttctgcctgcgttgttccccatcctcgttcccctggcttgtggtttttttttttttttttgcctccttcaaatctgggtccaaatactccctgtgagtcggctgtaaccctatctgctgtcattcattcacatcctgtcttgctccacactgtcaaatgctacacatgatactggctctgtgtgtgtgtgtgtgtgtgtgtgtgtgtgcgcgcgcgcgcgcacatgcatgcatgttgatatccttacacattgtgcctcatgagatggactctgatcattggcagataaataaatgattggcctaagaattgaacaggttgaaaactggggccctggggtccctgtcttagttaaggtttcactgatgtaaacacacaccatgaccaaggcaactcttataaggactacatttagttggggctggcttacaggttcagaggttcagtcagtccattatcatcaaggcaggaagcatggcagcatccagccaggcatggtgcagcaggagctgagagttctacatcttcatctgaaggctgctagtggaatactggcttctaacaacaagccacacctactattccaacaaggccacacctactccaacagggccacaccttctaatagtgccactccctgggctgagcatatacaaaccatcacagtccctgttgcctctggtccagcctcctggaagacagctgttcccctcagggtcctcagagctcactgataacgcttgggctgtgtgcctctgacccacttcccctcttcatttctagactggccttattgttgcgtgctaccatggctttgtggataccgtggtggccttagcagagtgtccccacgttgacgtcaactggcaggacagcgaagggaacacagccctgatcactgctgcacaggcaggtaagagctggcctttattctccctccagggctctgctgctgggccgtatgggctccggtgactcctggatgcatcccacagatctggaaatggattcgcctagagctgcgctgggaaggggctgactggcatgcaggagggagcgcgcatctctctgtgtgctcttggaacagcacacttagccaccgaatcaggaaggattcagaatggagctgccaccagctagagtcttcaccgtagagccacctccggaaggcaggcttgcctgcctctcagagcactgacaaccctggagactgggcggcgtggtactggtggcctggagccacagtctcgtgctttactgacagttatgtaattagatccactgagaaggtgaccttgctttttacctataaagaaacgccagggacagctctccgcgagcttcagagaattcgtgtaacagagcgagactaaattagtaagagtcctgtgaaagtggattcaagtacatgtcaggtcatctctgggagtgaatatatatgccaccattaccaagggcatgggggtgcccagggatttgtggtccattcagagtgctgtgatgtagcttaggaggctgcaggctgagtgcatttgaaacaagcatttcattcaatcactttaacataaatgcttacacttttccaaacggttgtgtaactgaccattccctacattcttagcttttatacatcagtaagcccgttgtatcctgagattccccatttgcagattcaacatggattaaaaaaaaaaaaataaacagttgtaatcggatctggaatagggcctatagatagctcagtggtaagtcgcttgctagccaaggataaggccccagacttgatcttgagtaaaacaaaataaaacaacaacagcaataaaaccattcagatgacaggtgtgtcagcactaaagcacatacagacattttcactcaccattatttgcttaaaatacagtataataagtatttgatatatctacactgcattaattactgtacataatctagggatggattaaccacacaatacaatgtgtgtaggttatataccaataccacaccattttacaaaattaaaaattattttactttttgtgtatgtatgttttgcctagtgtgcgcctgtgcaccacacacatgccatgccaagggaggccagaagagggcgctggatcctttggagctgcagttacttgatggttgagccaccaggtagatgctcgaaacaattcatggtcctttggaagagcagtgagtgctcttaacctctgagccacctctccagcccctactccatcattttatataagatactcgagaacctcagggttttggtatctacaagggtactggaacctgttctcaaagacaccaaggatgacagtctaggtcatcagtcaggttcttagcacaagtaacttgtacgtagcccatggctgtgtcaggaagaagaggcctttgtgtcctgaaggactgtgggacagcttgggtggtgtctcggttagggtttctatggctgtaatgaaacaccatgaccaaaacaacgtggggagcaaaaggcttatttggctcatgcttgcacatcactgttcatcattgaaggaagccagaacaggaactcaaacagggcaggaacctgaagataggagctgatacagaggctatggaggggtgctgcttactggcttgctcagcctgctttcttataaaaccctgtactgtcaccccagggatggcaccacccacaatgggctgggccctcccccatcaatcactaataaaaaatgtcccccccccacccccgcccaggtttgcctgcagctggtctcacgggagcattttcttaattggggctctctcctctctgatgactttagctatgtcaagttaagactctcccacacaagtgggaactgggctcaaggctctgaagccaaagtgcccaagtgtggtgatactggtagaagcctctgtagctgccccaaagagaagagaactctactgtctctcttgctttctaggttccatgtcaagggctctctgtatggatctcatcaggtgacacaagggaggagacacactggcatctaactatgtcaacttccttagcgggagtagtctgtgcaccccacaggccagtccagatgttcttgctggaatttcccaaagtcactgtgtcagcacacggcccttccctcccccatttctagagtgggggttttattctattggaggatcccagattttggaagcccagatctcaaccaccggcagcgggtgtgtgacagcacctctgtcatagcttaatttctgttgctgtgatgaaatgccccaccacacacacacacaaaaagggtcagcttcaaggagaaaggccttactttaattcacagttccaggttacatccatcatagcaaggaagtcaagggcaccagaacttaaactggttattcctgtcatagccacagtcaagagcagattgaacgatgcctgcctgcttgctattcagctctgtttatctactctattcaatctgggacccactattcagagaatagtaccatctacagtggactgggtcttcctatatcaattgcataatcaaaaccatcccccacagacttgcccacaggcctgatctacactatccctcgttgtgacttctgccctgggcagctatagaacatgtcaaggtggtgattaaaactatccaacacctatccatcacagcagtggtaggtgtttggcaaccacagccatcatacaggatatcctatggtcctagaactgttgggaatcagggggttggaagtgaggcctcaccctgccttgagtctttctccagctcccaggacagagaactagacacaggacctagcactacttgttcaggcattaggggagggacgggtgtcctgtggatatgcagtgggaacatttcacctggcgtgggcccagggcttgggctcagaactctgggcagagaagccagaggcaggtttcttagctaatgtgtctcaaagcctggggcttggatggagctgcagggatgggtctctggaatggagacaaggggatggtgtaccttgtgtggtgttagagagtcactatctagaagagaagagagttctatgatgaaggtaggggctgggccagtcaatgtcctgcagggcggttccaggtgacataatgtagggaggggacagaggaagggctgagagctgtgtgccaggaagacggctgtcagaggtgtcgctgtcagtgaggaatgaggtaggagattagacttttgggtgtctggtcagggaacagtacagatgtgaagagttaaaaattaagaagcagggggttgcagaagcatcgtttgtgttcgaaatgctgggtgatatcagcgaggaggtcccagtggcgagtgaagggcacagaaccagaaacattcatgggattagcacaactgagggccacggacatgggcaagatcgtgaagagtggtagaatgtggaggagagatctcttttctgatcgagttgccacattagttagtgcttgatgcccatggggtgccttctggactgtggtctatttgaaatgcctctggtttctataagcatcggaaccacaacttgactgagtatactcatactgggtgcccccatcctcctcccccttgctctcccctccctcttcacccctcctttcctctctcccttctctctgctttcttccctccctggaattggagggagttattggagtcccacctgctgtttgcattttgttgatacctgaaagtgtcacctatacttcatgcttgacatcagaagcaaagacatgcacctgcatggcatgtgtaactgtccttactacagttcatctggcgcccccttctggcctctgtaggcgccaggcatgcatacagtacgtatacacacacacacacacacacacacaaacacgcacacacacacacacacacacagagagagagagagagagagagagagagagagagagagagagagagagtcaaaacacttattatacacataaaatgaaagtgataaataaatctttaaaaatcctcagaagctagctgtcacatctcaggttccctgtgtgcttgtttgggcccctctccgggtgtgtgtttacttcaggaaacagtttccagctgctcctagaatcccatctgtctgtttgttctcagccctccagcatttattctcacctgtggggtggagcggcccttccatccacagccctgtcttccgagctggaaaatgcctcacggtccccgagtagcttcattattattcagtccccacggctttgattacagcttcagtgctggcaaaggatttctccccaaagctttattgtgagaagtccagacgagttcagaggaaagtggcgaagaccaggtggcagcggtgacttcgcttgtttgctgtgtgtgtgtgctgactgcccatattagttcttctcacggctgtcagaaaatacttgactaaagcaacgtacggaaggggcgtttatctgctctgtggtctgggggtacagtccagcaaaacagcacatgcccctttcccaggcagcttccagaacaacaccacatgtctgttctcagcaaagcatcctctcttgtgtctacttcagccaaacatcctctcataagacagtttccagaaaaaaatatcacatgacacaactgaatctccaaagagaccagaaatttccacttcaggtagaaattaactaggtgtgtctcctagttaattctaagtttggtaaaggtgacagcagggattagctatcctaccagttgcaggtcaatcacccaccccctggcccttgcatgcttcagcatacatctcctaagacaggagtgtagctaacaacctagcactgctgcacataagaaatataacagagacacagattatgtacctccaaactgagatgaaaagtcctcacgccccctacctaccacatccttatagacaagggctctgcaacagctatatccctaatagtttggctgctctttaaaccatgtgacatcagtatcacacactgcagttgggtgtcacaccccaccttcttgctgtcctgagtgagacctatggtctgtggtcataggaatgtccagatttttacgctgcagccgtgcacacccttaggtgacatcctggggacactgctgaggttctgttaaacagccctctttgtttggcattccagtgtctttctgcccacttgaagaccgcttcttctctttatataggggcacacttttcctgtactggtttaatttcctgatgacctgggccctgagccggaggttctggagctgtgctcggagcccagggtcagtggttgtaatgggactttctcatagcctagggctgtgaactctttcctctctgctccccactgcctcaactcttttcttttaatggcgtggggtccgtggcagaagttgagctgacattttgcctagggtgcttggtacctgctggcccagggaacgggggcttgcttcaggcagccctgagtttgtcactgggctagggtggctgccatacatcaaagggttgggggcggcatggtcacatccactgcccctgactgggttgagcagctggaaggtgatgaatttgaccgtgcaaggctcccgacacaaggcctggctgctttccttgggtgctgcttggataagtgggatggatacccagtgtttggaaagaaacaagcaagcagttaaggggtgagtgggaacaaagacttctcctctcccaaggttcctggttcccagaaggcgtgtccaaccttctgacattgcaacatgaagctattgtctacagggttcacattcacacttgagactggatgtgtgcaaggcgggcagctaaaaatgaacaaaaacaaacaaaaaccccatggaaatagccactccataattaagggggaaggttttttattataggtaaaatagagagtgggggtggggttctaccatggctatatttcagggactgagagaggatcagagagagagagccggagttgatagagaactagatgccctctctggaggttgggggactgtctgttggaggagagagagagagagagaaaaaaaaagacttctggcaaacagaaacctactttacatagtttctgaggactgctgagtgtttacatggttggagcgcagcctcagctgagtccacattgtcaccttggagggctgggacctgatactgacccattcagttataaaaaacagaaacaaactaaccagacaccaacagagcaaacaaaaccgcacaaagcagcaacaaggaaaccctcaacgttttcatttcagctacaattttgggttgggccacattggcagctgttcttggccacatatggccggaggtctgttaagacagccctgccgaggcaacggtaattagtgcctgatgtctgcatagggtttcttggatttagaaagagaacctattttctgttctttcctttttgttttgttctaatggtgttttttccctctttctctggcttctgttgttgccccctgcttgccagtttgctcatccaccctgtatgtggctggattgtttgtgcccattccctatctacccccaccactgcctacccccaccagccaggctcccacctgcttctgcctgcccaggcttccagctcagcaaattgcatagggaggaggtatgcacatctgttaaaatgtaaattgaaaagcgtttccttggtgcttgggggcaatcccagggcctctcatgtacttactatgagcaaaccctctacttctgacatcccctcttttgtcttaattgtctcagcctgatgaagtttttttcctagtttgtttggaagtgtcagaagcaaccttagccccatggcaagttgcgttcacagactggctcctgcatctgtagaacctgccctgcttaatccacccactgtttagtacagagctggttaaagcactgagtgccaggctctctgctaggcgttcctgttctaacagtctgaacctgtcaccaagtaccagggaagctagtgtgctcatcaggggacccactgtgaggttctgggtctcaagttctcctggcagatgtcatgggggaacccctcaggagctaccccagcagcagtactgctgatccccatgagatggctttagaggggcacaaaggcaccgtgagttcacgtggaaaaacagaaaagtgaggtggttggttttccagggaggccacagccctcatatcagctggatttcttaatttcaaccattgtctagaaattgctgcttgcagtaaagtcactacaacttgtgtgagagagaccaccttccctcctttaacactgttttactagtctgcactcagcaggtccccaagtagccatggcaaccatgccacccaatgtcagactttacaccagcattctttattctctgacctttgcaaccttaaagcctgtccctggtgacaggcctcctccaacatggccatgcctcctccaacctggccatgcctcctccaacctggccatgcctcctccaacatggccacgcctcctccaacatggccacgcctcctccaacctggccacgcctcctccaacctggccacgcctcctccaacctggccacgcctcctccaacctggccatgcctcctccaacctggccacgcctcctccaacctggccacgcctcctccaacatggccacgccttctccaacctggccacgcctcctccaacctggccacgcctcctccaacattgctatgcctcctccaatctggccatgcctcttccaataggccacacctccaatccttcccaaacaggtctactaactggagtccagcattcaaatatatgagccaatgggagccgttcttattagaaccaccataaatggctaggataatgctgttgaggttgtggttttaatctttttcccccttgacttggctaggaacattttctgtgagactcttgcagttgtgcctggccctcacagcatctaggttcacttctgtctctcacctagatgtctagtgtggagctggagcaatggctagatttaattggcaactttacacaacctagaatcacctaagagtctctgaaggatggtctaaattatcctgactttgagcatgtcttgggggggggtgttgttttgattacattaattgatataggaagacactgcccactgtgggtggcactgttaccccactcccaagtctgggttctgggtgtttagaaaaggtaagctgagtagcaagtgtgtatccattctctctgctcctgactgtggatgtgatgtgagtagctggttgaactcctgcctcagtttccccgcggtgatggactgtgacctggaattctaagctgaataaaccctttctcccctaaactgcctctttttcagggcattttatcacaggaatagaaatgaaagtaaaacagattgggtcatggctgctgtgagctccttgatgtggggacccactgtaagggcagtgggtgctgggaaccgaacttaggttctctgagagagaggagtatgctcttaactctgagccatccagtcacctcgtcagtcctatttaaaaaaggcttcctttgttattttaaaatgctgtgtgtgtgtgtgtgtgtgtgtgtgtgtgtgtgtgtgtgtgnnnnnnnnnnnnnnnnnnnntgtgtgtgtgtgagagagagagagagagagagagagagagagagagaaagggtgtgtgtctgtgttcatgcacttgtgagtccaggccaagcccttcatttttaaaacaatagttttattacttccaatcatcaggatcttgttttactttgagttttaggaagggcttgttttctcctctccctcctccttccctctcctcctttcctcttctattgttttaaagaaaagattagaatttggcaagcctttggtttcctaaccctgcctgctcttccactaaactcggcctacagagctctagcacactaactgcaactcagtcaggcagagcgggctcagacactgctctccctcccctccctttcctctccttccctccccttcctccccttccctcctcttccttccctttccctcctcttctccacctttgctgcccaactctggcttttcccctcttctaatagggattccccgggtatcccagcacgcctactggggtactgcatttccaaagccaacagctccctctactggcccgatttggagaactacactgagtcagacaagaccctggaaaaccaaatcctctaacactgagcatcttcctaatgctggaaccctttgacatagttcctcatgttgtagtgacccaaaaccataaaattattttcgttgctacttcataacagtaattttgctactgctatgaatcataatgtaaatatctgatatgcagggtatctgccgtgtgatcctgtgggaagggttgagacccagaggctgggaccgctgctgtgtttccatttctcccccctttcttattattagatatttcccacagtttccatttcgaattcagctttgcacagataaaggaagacattttttcatctgtccctgtttttagtgacaggaagacccttagccgtaatttgtgcttgtgacaatgttgaacgagttggtgattgcttacttcgtggccgtttaattttgaacgatggggtcatggtttattattaaggatctgctaagggaacgtctctggattcaccgagcctggagtctgcggccagttagagggctctggctcaccttagcacactgcgggtcagggtgcaaatgctgatgccaaaaccagaggatgaatattggaagggatggtgcatcaggtagtcagatgaagggaggctgggtgatctcggtagggtgtatacagggcccataggttaatagaggagctgtagccacaaaggtacttacatagcagtgtttatggtggcattatccataacagctaagttatagaacacacctaggtgcccagcagctggaatgtatgaggacatatggtatgtggacataacagatttttttttcagccataaagaaggaagtaagttacattagttgcaggaaaatggatacatatggagacaaaagtttccaaaaagacaaatattctatgttttttcgtttgtttgtttgtgtttccttattctatacaactatatgatcatgtacccacacatacacaacaccaaagagaagtaaaactgtctaagtcagcagttctcaacctgtggggcgtggcccctttggggggggtcacacgagcctttcacagggatagcatatcaatatcctgtatatcagatattatgatacgtagcaatagcaagactaaagttacgaagtagcaatgaaataaagatatggtttcaggtcaccacaacgtgagggtcagcattgagaaggttgagagtcactggtctagggaagagcagagacaaatgagcatgggtgggtgaagagtggaggcatgagcaagagtctgcccaatgtgccatgtgagtgtgtgtatggatgtgagtgtgtgactgtatgtgtgagtgtgtgtgtgtgagtgtatgtgtaaaaggttgcccaggctgaagagatgatgactcagcagttaagagcactgactgctcttccagagatcctgagttcaattcccagcaaccacaaccacaacccacatggtggctcacaaccatctgtaatgggatctgatgcactctcctggtgtgtctgaagacaggtgcagtgtactcatataaataaaaataaataaataaaacttaaaaaaagaaaaaaccctcaaagcaaaccataatacaaaggagagctgtgaggtcaccaggtgaaggacaaaggctctggttgggggacagatattttgcttagtgctctcttaattttttttatgttgccttataatttctaagttattccactctgcattctccttctaatcttgttctcccctccagcttgatgtgacaaagccttactcccaatgttctctctccagtgttatgatttccaatgttatgcctgccaaagtatctttcctagtcttttgtaacttttctaggagaataaatcacatgttttttttcaagcattcttttttttttttttacaaaagctcacattatttttgtaacattatttttgctgggagaggtggcttagttgttaaaatctctagaagttcaaacataaattcaaatcataaattgaataagaagtttaaaacagaggatgtttacatgcatatccattaagagtaattagctctccaggttcatggagagttaaagaccataatttttgtgactaagttataagtgaagtttgtgtagataaacccaatcaatattttatcttttgtccttgcacctatagtaaatcattatctccctttttatggcctttggttaatggttttacaacctcttggaatgtgctctaagttggagatgcctgcttgttatctcagaagcaattaattcttgacacttgaagactggcagagttctcattgcagttttgacatcagaaaggacttaatagcagtcctattatgaaagagcttaataattactaatataattttaggaattcttacaggatcatctataagacagtacatcttcatcattctgcagacatatctgctcaaaagggtaggttaatacctagtaataaatatatatataaaacaacaacaataggaaaagcatattaatagcaggaatctttcttaaaatgaaattcttcttggccttgcctagagaagccattctctcattaactttgacagtccatggcagaaccatctcaggaagatcaccgtctagtttttagcttctcctagatagctcctggcattggagattggcagtcttatgcacatgcaggagatgggggagggcttgggatggagcacagatgtctggtggtatccatcacctaaaaagcactgggggagaggaacaggccagaggggtagatgcttggggtttgatgcgggacacccaggataaatacgcagtagacacgtagacgagagactaatagacagaagtatatgcaggtgcattggagatttagaggtaataattgaatacacggagcatgtgggatcacggaagggagatcatgtgggatcacggaagggagagcatgtgggatcacggaagggagagtatgtgggatcacggaagggagagtatgtgggatgaggagagtgttttcccatcagctgaggagcagcagcttcccaggaacaagaaaggcagagagatggagggtcagagggtgagcttccagaggtctcatagaaagacagttctgcaaaagagggagggggaaacggttcatactgtggcggtgtcaaggaacagaatggacaagcatctggttcaccacagtattgatggacagctgttgggaggccgttcagtcacagctggacgagtgtcagtagccggagagcacaggactgaaggtggacccacgtggctgttcgtgtaaaggcagacccatagggttattgttggaaatacatgctttctatttttaattatgcatgtgtgtgtatctgtgtacatgattatgggtaccgacaaggccacaagagggtactagaccctatagaacaggagttaaaagagattgtgagcctcttgtaactctttaggtgccaggaactaaactccgggcctttgtaagagcaatgctcactcaacagaagagccaccctcaccccctccacccctcggactgagtaagatgagaggcttagacatgcatgccagctagctactgctgggtgactccctgcctctgcagagttgacttaatgctcatgcttctgtggacaggctgaggtcttgactttattgctttcatttatgattaaactggggaccctgtccttggacactttatccagggcaactgttttgctggcatttcttgtcatgctcattttgggagtaatgaggcagctgggggtggggggaagctgaggccccaggatggggagcgtctgagtcagtacatttgagcatctgccggcttcctacctgcaaatactccttaggaaagtgttcagaaccacgatgacagaaccatgatgtcacatagccaggggcagggtgaggaactatgggcctttcatgtgattagtatgaacatgtctacaaggatggtaagactgatgagccgaggcaaattgtggctaactactccaggaaagctggcccagaatggctctcaagccgggaggtgtaagatggtaggttggcagcttggcttatgatgtcatcatggctcttgctgccattactaccatagagctgggaagttggcaagattttgagtaacgttagttttggtgggacaggtggcttgttgttagagtctctgttatgcaagtgttgagggtcagagttcaaatcccaaaatgcatgtaaatgttgaatagattgtctcagaccggactgggctcaatgggcccttatcaatccgtgctaatcaaggtccctgacagatgggcatagagtcctcgagtgacaaacagacaggacaggagagagtgtgttgaatctgaatgtaatgtcacaaagtgaacaccagtcttatataatacagaaaacaaaggggtaggatgtcacagcaggcaaagtacattgaagttatctgacacaaaacagaggaatgacttcaaaaggacttacaggaaccaggtaatattcacagtaaagataaaacagccctgcctagggtcaactaatgacaggtaaggatttcacaccctagtcacaatttgtgctactcctttgagccttgtgaaagctagcaccagggggttctgctctagcagaccttctcatgaatgatgcaacactacaaccctccctatttcctaggcctaaatacctggggtttcaagggagagagggggcagggactccttgtgaatgtggggctactgcgggggtgaggtgggggaactgaggagttcccttcccgtgactcttgtccctcgtgaagtgggaggcgaatcttttcctgacagagcagtttgctctgaggcaggtgatttaccagttagttgatagttctgagctccagagatggctcagtctgtaaggtgcttgccacacaagcatgagaatctgagttcagacccacagaacccatgtcaaaaatcccaggtgtggcagtgcgtgtctgcaaccccagctccagagacttggagacaggtttgttggctaaattgacaggttccaggtttctgtaagagaccctgtcttaaagactaaggtggagatagttgcggaagagactcaatgttgnnnnnnnnnnnnnnnnnnnnnnnnnnnnnnnnnnnnnnnnnnnnnnnnnnnnnnnnnnnnnnnnnnnnnnnnnnnnnnnnnnnnnnnnnnnnnnnnnnnnnnnnnnnnnnnnnnnnnnnnnnnnnnnnnnnnnnnnnnnnnnnnnnnnnnnnnnnnnnnnnnnnnnnnnnnnnnnnnnnnnnnnnnnnnnnnnnnnnnnnnnnnnnnnnnnnnnnnnnnnnnnnnnnnnnnnnnnnnnnnnnnnnnnncaaagcattagaaccaattcccaacacgtgtatatcctgatcgtgctggtgggatgatgaagctgacatgtggggggtgggctgatgcgtctccttgtgtttcacagagacccgcccactcgcttctcaggagtgcgctctgtcatcctctgatctctgctcccttcctgatggtccagccccgcctccacagtgtccggtaaatagcacagcaccccctggaggcgaggaggatccacactaggcagcagctacacattgcgttcctgcctcgattagttcttctgccttgtttaaaataaactttcaatttcagaatagtttggatttaatagaaaaaacagcagacttcacatagaattcctgtacatggctcacccggtttccccgttaagatcttgagttagtgtgattgatgcagtgagcgagccaatatccacacactgttaatgtcttagttaggtttctatagctgtgaaaaaaacatcatgaaccaaaagccacttgttaaagagagaatttagtctgcttacgtatccagggcacagcctactgagggaagccagggcacaactcaaggcaggagcctggcagctgggactgactcaacccacaggaaagctgcctgcttgctctgcatgcctcgttcagcttgcttgcttatacgcccaggaccacttgaccaggaatgggagcacccacagcgagatgggcctcacacagcaaccaccaatcaagagaatgtcccacagacttgtctacaggccaatcttatggaggcattttctcaattaagagtccctcttcccgagccgggcatggtggcgtgcgcctttaatcccagcatttgggaggcagaggcaggtggatttctgagttcgaggccagcctgatctacaaagtgagttctacaacagccagggctatacagagaaaccctgtctcaaaaaagtgattcttaggctgtgtcagattgacataaaactaaccaggtcagttagtagctaaatccccttctttatttagattttcttgtgtacttcctgccgtcatttcccctgcccccttttccaaggcagtgttttgctatgaagccctggctgtcttggagcttgctatacacactaggttagactgtagaactttcagcaatcctcctgcctctgcctcttcagtgctgggatagataacatgtagatgctaccacatttggcctctaatgtccttttttcgttctaggttcccatccacgattctgtattgcatgtctgtgtctctaggctcctggtggctgtgatattttnnnnnnnnnnnnnnnnnnnnnnnnnnnnnnnnnnnnnnnnnnnnnnnnnnnnnnnnnnnnnnnnnnnnnnnnnnnnnnnnnnnnnnnnnnnnnnnnnnnnnnnnnnnnnnnnnnnnnnnnnnnnnnnnnnnnnnnnnnnnnnnnnnnnnnnnnnnnnnnnnnnnnnnnnnnnnnnnnnnnnnnnnnnnnnnnggcctctcatcatagcttcagagggcacgtggtacaaacacaactttggtcccctggctcagtagtggtggccagtttctccactgggaactggagctccatgccccttttctttttctttttctttttctttttctttttctttttctttttctttttcttttctctttctttctttctttctttctttctttctttctttctttctttctttctttcctttctttctttctttctttctttctttctttcttttttttttccagatagggtttctctgtgtagccttggctgtcctgaaactcactctgtagaccagggatgggagcaaaaatcagaaatccgcctgcatctgcctccggaatgctgggattaaaggcgtgcgccaccacaccccggcacgccccctttcccatgttatatatgctctggggagagaggtctccaggctcagccttcaagccaggagtaaggagccgcttttagctggtaacggtgactgacgttgttacccgctcaggtactttggggttctttgtgtggtttgctcttttgtttgtttgcttgctgtttgcttgttttgaggcagggtcccatgcattccagacgagctgcagacttgttatgtagcttagatgagtttgcccatcctgcttctgcctcccacgtgctggggatacaggtctgaccaggacttttctatttgtctttttttgctaagaactttctgcacactttctctgctgtgcctttcgtaattgtgcattgatatcatctctccattttatagccacagaaaacttgattcccttctcaagagtacctcggagttttgaaggcaggtctgggaattggactctctttttagagtaagctctctgaagtatagtggtaacctcttagttacattggggaccacttgtgccctttcccttgggcaaggtaaggctcactgcagggaggtagggagtctctgtggtgattctgcccttaagatagaaccaactcctgcagtgtgtaagttgggttagagtcaaaccagctttgagtatctgggtgcctttgcactgaaatgagtatgtatttagtataaatacacacacctgtggcaagttgaatgggcagagagaagaaaactgcccatcgtacannnnnnnnnnnnnnnnnnnncctgcctgtgcttttttttttttttaattggcccctcagcacagagttcgtttatgtgtggtgggggacagtgattcagtagcagactgaagaatgatcatgctataattactataaaagcaaaaggcacatgcaatactgcatagtaacgtaaaacacatgcgtctcattccgactattattttgtagttgtcagaattcagtgtgcttcagttcctgagtgcttttaacatcagatttttgtttctgacttgcaattttcttacattcagttggaaccacttcacctagaaataatgagttattgaattggctgaccatctaaaccctttagatttttccagagtctataacacacaggcacatgtcaggccttatctgcattgtcagatagaataaaataacgttagaattatcggaacgccgagtgtaatgacaaatacagccgattctgcaagcctacctggtggctgtttggattaggtttcctgataatgtcagccattctgataagaatcgaaagggacatgcagcaccttgtcaacccagtggaatattaatgcaataaagtgacaggtctattttcgtaagtggctctgaggagccgtgtcaacgatgtgatttcttcttcttttttttttttttttcatggagtttgccaggttccagacttgctcaacagagttctctttatttctgaagtgtgacgtaattgctgctgtctccggcaggaagggccggaggctgaagcctagtatcatggttcttgggaacagaatggcttgggagggaggcatggagcaggctgcagacactattccttgtgtgtttgctatcttctcagacaagccctcatggcacgcttctcaaaaaccaggtgacttgtgtcaacacatagttgttttcagtttatacggaggacaggaatttctggttccagttatgagccagaaggattcctacaatcaggaactctgcactgaaaggactcggtgtagtgtttgtagaatgtgaccttagcatgaagcatagagggaggtgaccgggactgtattgtgggccactgggctgcagtccagtgtctgcaagacagacaccccaggaatgccagctgatgacatgggtgagctatgctatctcaggagttcctgagcctgggtctcatgcctcccagaggagagcggtcctgagactgagtggtccacctgttctctctagcacttgtttgtagtgctgtctgtttcaagtaacaaaaatcctgtcccagggatgatttttaaaaaggtaaacatctgggctggagagatggctcagtggttaagagcactgactgctcttccagaggtcctgagtttaactcctagcaaccacatggtggctcacaaccatctataatgggattcagtgccctcttctggtttgtctgaagacagttatagtgtactcataaataaagtaaataaataattaaatctaaaagaaaagatagacatctatttcccctatgttgttagaagccatgaagtcaacagatagcacccagatctgaccttggttccctgatatcacagacactgctttctttccaccagttcccccgnnnnnnnnnnnnnnnnnnnntaggttcccatccacgattctgtattgcatgtctgtgtctctaggctcctggtggctgtgatactttctcagactgtctttgtggttgatggtcttaataggtttgcatacaggatctggtgtattttaggatgccctctatttgaactgtgccttggaattggattgcagataggagctctttggagccacacagaacacagggcccctcatcattgcttcagagggcacatgctacaaacacaactttggtccctggctctttctttctttcttttttttttttttttttccagatagggtttctctgtgtagccttggctgtcctgaaactcactctgtagaccaggaatgggagcaaaaaatcagaaatccgcctgcctctgcctcccgaatgctgggattaaaggcatgcgccaccacgcccggcacgccccctttcccatgttatatatgctctggggagaggtctccaggctcagccttcaagtcaggagtaaggagccgctttcagctggtgagggtgactgacgttgttacccgctcaggtactttgggttctttgtgtggtttgctctttgtttgtttgcttgctgtttgcttgtttgcttgctgtttgcttgtttgcttgctgtttgcttgcttgcttgctgtttgcttgttttgaggcagggtcccatgcattccagacgagctgcagacttgttatgtagcttagatgagtttgcccatcctgcttctgcctcccacgtgctggggatacaggtctgaccgggacttttctatttgtctttttttgctaagaactttctgcacactttctctgctgtgcctttcgtaattgtgcattgatatcatctctccattttatagccacagaaaacttgattcccttctcaaaagtacctcggagttttgaaggcgggtctgggaattggactctctttttagagtaagctctctgaagtatagtggtaacctcttagttacgttggggaccacttgtgccctttccttgggcaaggtaaggctcactgcaggaggtagggagtctctgtggtgattctgcccttaagatggaaccaactcctgcagtgtgtaagttgggttagagtcaaaccagctttgagtatctgggtgcctttgcactgaaataagtatgtatttagtataaatacacacacctgtggcaagttgaatgggcagagagaagaaaactgcccatcgtacagatgttttatgtgtatcatgttgaagtcaggaaatccagtgtgtcgagcctgtgtcctgattgtcagctggagctttgatgatctaagagtccttccccatccccaggctttttcaagaagggagagcagcaactttaccatgcagactgttttcagtagaaattaaagatggaccagctgcttctaacaccgtttaaacactaactgttctccttaaaagtcagggcaagtggagactaggatagctagtgtgtgtgtgtgtgtgtgtgtgtgtgtgtgtgtacaacgaatacctgctgcaaattgtgactgacatgcggtgtcacattttcaaagaaaaagaccgcaacaaatcgcaattcgtttcatggagacccagtctaaatccaaccagtgtggcaagtgttcaagcagagcacaagctaactttagatcaaaggtcttcttctaccccactggcttgagagctattgagctatcatgagctcctgaccccccagcttcatcccaaactcatcacacagaggaggtcaagaggccagtgagtccaagcagcaccgtcacaagctggaatctgtgtgttaggtcctggagtgccagcctggtcttgttagcactggaaccctcagagaggtgctgacccatcttttcacagctgtggctgagctcagtggtaagctttagccttgcttcttcagaattggaactccagtttatgtggcttgagtattgctaacctataagttggtgacaggccaatccggaggattaaatttggagtgtgtgggcagaagcctgaactatataatgcccatcagaaggtgtcacaggtgttccaacctggatatctgtgtcacttgggtgtggtttggctgactgaagccactcagcgtattaggtggatttaatattgtgctcacacagtggaaggactttggaggggaccaaagacatgtacatgtccccccatccccagcttctacgtccatctccaagcccactttactggaagctcagctgcagcagggaaacagattctcagagttgccaccagcttcagctttcttggtctgcaggcaagcaggagaacccccaaagtgcctcctggttttaggttccatgttataacacacattcaacctgtgccctgggttgcccatgcttggatcggggctcaaacacatgccctggcttccccacaggaaaagggactgtgtcgagtacagagctgggggtgggggtgnnnnnnnnnnnnnnnnnnnnnnnnnnnnnnnnnnnnnnnnnnnnnnnnnnnnnnnnnnnnnnnnnnnnnnnnnnnnnnnnnnnnnnnnnnnnnnnnnnnnnnnnnnnnnnnnnnnnnnnnnnnnnnnnnnnnnnnnnnnnnnnnnnnnnnnnnnnnnnnnnnnnnnnnnnnnnnnnnnnnnnnnnnnnnnnnnnnnnnnnnnnnnnnnnnnnnnnnnnnnnnnnnnnnnnnnnnnnnnnnnnnnnnnnnnnnnnnnnnnnnnnnnnnnnnnnnnnnnnnnnnnnnnnnnnnnnnnnnnnnnnnnnnnnnnnnnnnnnnnnnnnnnnnnnnnnnnnnnnnnnnnnnnnnnnnnnnnnnnnnnnnnnnnnnnnnnnnnnnnnnnnnnnnnnnnnnnnnnnnnnnnnnnnnnnnnnnnnnnnnnnnnnnnnnnnnnnnnnnnnnnnnnnnnnnnnnnnnnnnnnnnnnnnnnnnnnnnnnnnnnnnnnnnnnnnnnnnnnnnnnnnnnnnnnnnnnnnnnnnnnnnnnnnnnnnnnnnnnnnnnnnnnnnnnnnnnnnnnnnnnnnnnnnnnnnnnnnnnnnnnnnnnnnnnnnnnnnnnnnnnnnnnnnnnnnnnnnnnnnnnnnnnnnnnnnnnnnnnnnnnnnnnnnnnnnnnnnnnnnnnnnnnnnnnnnnnnnnnnnnnnnnnnnnnnnnnnnnnnnnnnnnnnnnnnnnnnnnnnnnnnnnnnnnnnnnnnnnnnnnnnnnnnnnnnnnnnnnnnnnnnnnnnnnnnnnnnnnnnnnnnnnnnnnnnnnnnnnnnnnnnnnnnnnnnnnnnnnnnnnnnnnnnnnnnnnnnnnnnnnnnnnnnnnnnnnnnnnnnnnnnnnnnnnnnnnnnnnnnnnnnnnnnnnnnnnnnnnnnnnnnnnnnnnnnnnnnnnnnnnnnnnnnnnnnnnnnnnnnnnnnnnnnnnnnnnnnnnnnnnnnnnnnnnnnnnnnnnnnnnnnnnnnnnnnnnnnnnnnnnnnnnnnnnnnnnnnnnnnnnnnnnnnnnnnnnnnnnnnnnnnnnnnnnnnnnnnnnnnnnnnnnnnnnnnnnnnnnnnnnnnnnnnnnnnnnnnnnnnnnnnnnnnnnnnnnnnnnnnnnnnnnnnnctctcacagaatcagtggcagtaagaaatatatttgttgttgttgttgttgttattgttgagctgtatggttgtcatcatttgagttttgtttaaaagccaaaagcaagccagggtatcgagggcccagtcagcagaatgcgtttctagcgtacaaagaaccccaaggctactacaacataaactgagtgtggtgtcacacgtctgtaatctcagcactcaagatgcagaagcatgaggataaggagttcaaagccatcctctgttgattcccacaaccactatgagtggctcccctctgctgaagtctagcataatcctcaggagtgcgggtccttgcctgccgtgttccttagaatgcagcagaaacaagccccaagccaggagggcagcttcctgtgctgatgacatcataggctttctgggctgatgacatcataggaagttgcaggtgggaggaagctgtcagtacaagctagctatgaccagctttcactattgatccatgtatgtgatcaggagttatttccgaatgaatgaaaagtagagtatatttttctttttaaaaggtacccttgtggtgagatatttgtgctgataagcacataacttcttgccactgtgacatgtggagttcgctccattctcctggggtcttcctgccaatgttgggtgttagcagcatctgtggcttccacttaccagatgactgaagcatcctccagttggaacaccccaaaacgcttgcagatattgccaaataaccctatatgtgtggttgtctctcattaagggccacagattacaactaattaaagtgagataggattttaaagtcagaagagacctgtctgtcctcggacacaatcctccttcccggcctgttctgctccagactatactggcacggtagctcttttagggtgcatttgagctccccaggaagtcttggctggagaacttaatctctagactattctcacgcacacctgtcttgttggcttaattcttctcaggaaactgaacttcgttttccttctgtgtagatgtgtgagtgatggcctccccaggtttgtcctgcagtagtaaggatgcttgttgacatattttaaaagtttgcatcgctgttttgatcctaatttccctttaaatataccagtattaagcaaccagaggtattcataggaaccggtgcttttctttttctttttttctttttataaagatttatttatttattgtatgtatatgagtacactgtagctgtacagatggttgtgagccaccatgcggttgctgggatttgaactcaggacttttggaagagcagtcagtgctcttaactgctgagccatctctccagcctgcctgtgcttttttttttttttaatannnnnnnnnnnnnnnnnnnnnnnnnnnnnnnnnnnnnnnnnnnnnnnnnnnnnnnnnnnnnnnnnnnnnnnnnnnnnnnnnnnnnnnnnnnnnnnnnnnnnnnnnnnnnnnnnnnnnnnnnnnnnnnnnnnnnnnnnnnnnnnnnnnnnnnnnnnnnnnnnnnnnnnnnnnnnnnnnnnnnnnnnnnnnnnnnnnnnnnnnnnnnnnnnnnnnnnnnnnnnnnnnnnnnnnnnnnnnnnnnnnnnnnnnnnnnnnnnnnnnnnnnnnnnnnnnnnnnnnnnnnnnnnnnnnnnnnnnnnnnnnnnnnnnnnnnnnnnnnnnnnnnnnnnnnnnnnnnnnnnnnnnnnnnnnnnnnnncttttaacatcagatttttgtttctgacttgcaattttcttacattcagttggaaccacttcacctagaaataatgagttattgaattggctgaccatctaaaccctttagatttttccagagtctataacacacaggcacatgtcaggccttatctgcattgtcagatagaataaaataacgttagaattattggaacgccgagtgtaatgacaaatacagccgattctgcaagcctacctggtggctgtttggattaggtttcctgataatgtcagccattctgataagaatcgaaagggacacgcagcaccttgtcaacccagtggaatattaatgcaccaaagtgacaggtctattttcgtaagtggctccgaggagccgtgtcaacgatgtgatttcttctttttttttcatggagtttgccaggttccagacttgctcaacagagttctctttattcctgaagtgtgacgtaattgctgctgtctccggcaggaagggccggaggctgaagcctagtatcatggttcttgggagtagaatggcttgggagggaggcatggagcaggctgcagacactattccttgtgtgtttgctatcttctcagacaagccctcatggcacgcttctcaaaaaccaggtgacttgtgtcaacacatagttgttttcagtttatacggaggacagggatttctggttccagttatgagccagaaggatgcctccaatcaggaactctgcactgaaaggactcggtgtagtgtttgtagaatgtgaccttagcatgaagcacagagggaggtgaccgggactgtattgtgggccactgggctgcagtccagcgtctgcaagacagacaccccaggaatgccagctgatgacatgggtgagctatgctatctcaggagtgcctgagcctgggtctcatgcctcccagaggagagcggtcctgagactgagtggtccacctgttctctctagcacttgtttgtagtgctgtctgtttcaagtaacaaaaatcctgtcccagggatgatttttaaaaaggtaaacatctgggctggagagatggctcagtggttaagagcactgactgctcttccagaggtcctgagttcaactcccagcaaccacgtggtggctcacaaccatctataatgggattcagtgccctcttctggtttgtctgaagacagttatagcgtactcataaataaagtaaataaataattaaatctaaaagaaaagatagacatctatttcccttgggtcattagaagccatgaagtcaacagatagcacccagatctgaccttggttccctgatatcacagacactgctttctttccaccagttccctctctctctctctctctcccctccctccttccctccctcccttcctccttgcccctcctctcccccctctttctctctctgtctatgtatatatgtctatgtgtgtgttcatagacttgtgcacatgggtgtgtgggtgtgcatgcatgtgagcatgcatatgtgtggaggccagaggttctattgcttttcacattgtgttttgagacagagcctcgtgttgaacttggagcttactgactcagctacaatgtctgaccagtgagccccaggaccttctgtctctcccttctcagcactggggttacaggtgaattctaccttgcccagtgcctggctttctacatgggctgggagtccaaacacaggtcctaataatcatgtggcagatactttaccgaatgcagcccagattgacacctgttgattctgtggcaatctgggcctgtgactggacctgtgacgtgtttcaagtaggaaacaacagcagcaggagacaaacaactcattagggttcactaaccaggactggctccctggccacaggaggctgactggctggggaataggactgtagttaaaccagtgattctaagatggagtatgtcatctcctaggtgttatttgacatgaccaagagtttggctgttacaacaaatgggttactactggcatcttttatagaccaggatgttcttaaaattcccacagtatacaggctagccccataattaaggattaactggtcaaagattcctgtaatttcaatattgaacaaccctaggttaaaccaatcacgatgtattgtgtagagttgaggataatgttgctatgagtgtagtaggacattctgcataggcagcttccagcacacagtatggcaacagtgagagcccacgccatttgtctctggttttgttcagtgggtgaaatggtgctggctggaatgtggatgctggtgatctacagtaagcagtgcttccgaagctctcgtagttactccttgaaaggtattggtataaagtgtgaatcatcttccagggtggcagagcacttgcttggcatgtacagggtcctgggttcaaaccccagcactataaaacgtgttctgccagccccatgtctcagattctctgtgtgtgggttcagctagctctgacagaaaaaacacacacacatacaagcacacacaggcagacagatgttttttgttgcctttcccgaaacacagtatgacaatgataggtaacatttgtattgagttaggattatgggtaatcaggagatgtttcattgtatccgtaaatagcagtggttctcaactttcctaatgctgcgactcttttatacagttcctcgtgttttggtgatgcccccccccccatataagtattacagtgctacttcataattgtaacttttgccactgttatgaatcatatgcagaatatttgatatgcgttggggttgtgaccccaggttgagaaccactgatatgtagggagggtgatctgcatgggtgctatgcaaacacaccacctcagaatttgatgtccagtgaggatcctgtgcccaatctgttgtggaggccaggaccagctgaactcgtctctcacagtttagttgctgttagcctcagccttggtttcttgagaaagtgggtcgctaacttggagcatgtgactgggggtccagggctgctatgatagggttggcctgtcttcttgatttatagcacgtgttttccgatcatgttaaaaggttggaggcagactgctaagttctggacagccattcctttcatttttcattagcatttgaaaaatgtctctttcatgcaaatgttcattacggttttaatttcgcagtttgttcccttttaacgtgacatgcaattaattaaggtttaatgtgtcatctatttttgcagtggcatttttactgcccccttttcatttttgctagtttataaattgtgctctggctaatgagttcctcctgaattccagttccaaataattgccacttttctaagacaactattctttagtttgtcataggactaagaccatcagcaggggaacttaaaggaggtggtcttctgagccatgaggctgctgtggtcctgcatgacagggatgtggctgagccctatgctctaggctcagaacaagtgagcagccagcacgtggctgctgtgttgtgtctgtgtgagatgtgaatgcagatgtgctgctggctgggtccctagagagctcacaggctaattgcccgggttctcctgaatgctttgccagtagggaggaatgggactggaactcctgcatgatttgtaactatgttgcggtgagattggaccaagatgaactgagcagcaatttctgtatccctttcgaaaggcagaggtagaaatgtattgtccatctcagttgagttggggtttaagtctgcagtgtgttttgcagaaggggccatggtggagagattttcaggaagtaactgtctaaggaagataagggatgtctttaaagaaacagcccacggggcatataaataaagtgattcttttatatgccctgtcttaggcaatggtggggattcagaagtctgaaattcatagagggtgtataggcaggagcctctgctccaggaaacccgcacctgactggatggggctcaccacatttggaaagcaacccctttgacttagaatcagatgtcttcaggctggtgcttattagctttgtgtttgatcaaaccactgagtgctatggcctagccaagcgaatacaaaattagccagcatagtggtgttgcttgggctgtggaagcgtgtggatctgagtataggtgtctgaaggcagggcctgcttggcttccagcagtggctttgcagcctcaggtagccgcctcagccgctggcacaccatttcatcaggagtctttgttaaatgcatatttctcacattcagggtaagatgctccgagaaaaccttaggcaattatgttacaccttcatcctagagtgtccattggcttgtggaggcagctgtgtgctccaagagaagcaggacattaccatgtctgtagaaggaggcctaacatagatatgcacagaagtgaggtgtcaccaggctttgccagttactgacaggacagccctcattgctagaatgttctctcattgttaaggtgatggtggggcctgttaaaaattcttttaaaagttgcattcatttatgtgtatttgtgtgtgcgtgtgtatttgtgtacatgtgtatttgtgtatgtgggtgcatgtgagtatgtgtgcatgcatgtgtatatgtgtatttgtgtgtatgggtgcatgtgagtatgtgtcatgtgtgtgtatttgtgtgtgggggagcatgtgagtatgtgtgtgtgtgtgtgtgtgtgtgtgtgtgtgtgtgtgtgtgtgtgtgtggcatggtagcacaagtaccgtggcacacatgcaggagtcatgttgatgtgtgggttcctggtatcaaatactggtggcaggtactaagccatttcaccagctttgtggagacttacttctttaaaacaagcaagcaaacaaacaaacaaacaaacaaatctgttctcctactttgggctctttgagaccaagtgttgctatgtggagctttggctgcttagaactcagtatttagcccggcatagcttcacacttgagattttctcacctctctctccaagtgcctggggttgcaggcaggagccaccttgcctggctttgttgcaggtttttatctaggaaagatgaatcacctaagaggcatttgcgaggctatgggtggtgccttgtgagcataggaactgtgcctgggccggtccaggttccctgtaagtactgtcctgaattctgctaccattctctgcctgtgaaagaatatcctagcagcccaccccatcgctgcatgtgcgcttttgtttttcaggggcagatgttcaagcaagggatccccgtcgtgggctgtcaccacaggagtgggctgcgtacacaggccgagcggaggctgttcgcgtcattcagaggctgatggagcgaccctgtccagagcagtttggggacaagtacaagctggaattgccacttcccgctgaggcggttttgaagaagtcaggttccaaaaactgcttgcagagattcaccgcgttcctgcggtccactctgacctctcgctcctcaggccagagcctggaggatgggggcgtccttgatcacatggtcaggatgaccacgagcctctacagtcccgctgttgctgtagtctgtcagacggtgtgccctgagaaccctccctgtgtggggaaacgacgcttggcggtgcaggaaatcctagcagctaggggcaacctgaacgcccaagcgcaggacagcaacaaggtagagtgctctgagccacaatcccagattttggagactcccagagctagctcccggtctcccaagtcgcccgcggcatcgaggtccactcctgcccctgtcactcggaaggccagcctcctgcctttgcagttgcttcggagaagcagcgtgcggccgggcgtggtagtccccagagtgcgcatcagcaaggcacctgcgcccaccttccagccagagcgcgcagcgtccaagggcaacaccaaggacagcatctacctgcagatccccaagtggcggtacaaggaggccaaggaggagaagaggaaggcagaggaggcggagaagaagcgccaggcagaggctcagaaagaaaagcgggcgccacgatggaggaaaaggacgtgaaggggctatgactctcatggcgcctgtgcttggtgcgggggaagcagcataggggtccttcttgggaggctgcaggcgggctctgtagacagcaccagagagggatgctcctgttgccatgggtgcatgctgaatcacacagcctcctggtcattcacctttcctagatccactaaggacggtcctcattgctcccaagacagaactgggaaaagtacgggtggttttgattaaaaccagttccctgagcattctatacactaagaggtcagtttacctagaagtcacccttaaagaaccccaatcaagaatttaaaaccccagtttatcaaagggcattttcacataattttgtatcttgttatttatgaaaaattgcagcattttacaagtgatgggctctttataattaagtcagttttaatacttgtatttgtttaaaatgctgtgtctagcaataaatacttgtaatgactgtgtgacttacacagaagggattctccccttgccatttggttctggcctctgccttctcgtgtcctatggccacacctgtgcactggcttttcctattaacttgagtgatgccaaatgcctgtttttacttgagaaaggcaccggcttctatccaaaccgatcaagtgagatatgaagtcttacttcctttcattctttaaaattcttttgttcctaccagcccctgaccccctgccaatcaatcacttcatcaaaactgattatggcacactgcagaaatattatgttgctaggggcaaactcattttaagcaaggggcttggatagatccatcttccagggggtttgaggaagacgatcatttaatggaggcaggtcttaatggatgagtagcataaacaaagtcatatacgcttacaaagagcacaagtggatctttaaaactgtcaaagatgcagagggtaggacagtcagaatgctgccaactgttgaagggctgcatttttggaacaggtgctacacactggatactagacagggtagtttgggaaaggttctcccagagtaggcaacactctgatggtcgccatctccttcagattcaagtccagagagtcccttgtgtgtctttctactgatagttctccattgatgactggccctggtgtttggctcatgcccacgcaactttatagaacttccagtatgtggggactttggcagggcagcgatgggatttatcccgggtgccaacacatcggtgagagtttcctttccatttccaaagcactgagaagtcccagctgggtcttagagtatctgttgcacaggcactttatttgaatatttaatgtaaagacttggacgctatagagtcagaatattgcaggctgatttggaagctctttgctgaggtctgtcttacacagggggtggggtagcaaactggcttaagcttatttcttcctaattggtaccattaagcattaaataacattatctcacaccagccttccccaaaacgccccaaaacaggaccctaagcctgttcacaggt

SEQ ID NO: 108 - DNA, 1617 bp, Mus musculus
cgggagcgcagccgcctggagctgctttctgccaggctggagcgcgcggggctcctgctcttctgcgaacgcaggggccaagggtcggtgacctccgggcgcgccccgttttcgtgtcccctaattcgagccccagcccccggcccgcgccttggcctccagcatggtgctgctggctgggcccgggccggagggcggcgggacacgctgcttgtccccgcagtcgccgacgccaccccgtagcgagcagacaggagaagacccagcggactacgaggagtacgaagacttctctagtctgccggacacccgcagcatcgcatcggacgattccttctaccctcccggaggcgaggaagagtacggctcggtgagcgcggagagcgtcccggagggcgtccctgaggcggcgaccctcctgcgcgccgcctgcgccaacgacgtggggttgctgcgggcgctagtgcggcgcgggccgagttccgaggaggtacgggagactgaccgcaacggccggggctctgctgctgggccgtatgggctccggtgactcctggatgcatcccacagatctggaaatggattcgcctagagctgcgctgggaaggggctgactggcatgcaggagggagcgcgcatctctctgtgtgctcttggaacagcacacttagccaccgaatcaggaaggattcagaatggagctgccaccagctagagtcttcaccgtagagccacctccggaaggcaggcttgcctgcctctcagagcactgacaaccctggagactgggcggcgtggtactggtggcctggagccacagtctcgtgctttactgacagttatgtaattagatccactgagaaggtgaccttgctttttacctataaagaaacgccagggacagctctccgcgagcttcagagaattcgtgtaacagagcgagactaaattagtaagagtcctgtgaaagtggattcaagtacatgtcaggtcatctctgggagtgaatatatatgccaccattaccaagggcatgggggtgcccagggatttgtggtccattcagagtgctgtgatgtagcttaggaggctgcaggctgagtgcatttgaaacaagcatttcattcaatcactttaacataaatgcttacacttttccaaacggttgtgtaactgaccattccctacattcttagcttttatacatcagtaagcccgttgtatcctgagattccccatttgcagattcaacatggattaaaaaaaaaaaaataaacagttgtaatcggatctggaatagggcctatagatagctcagtggtaagtcgcttgctagccaaggataaggccccagacttgatcttgagtaaaacaaaataaaacaacaacagcaataaaaccattcagatgacaggtgtgtcagcactaaagcacatacagacattttcactcaccattatttgcttaaaatacagtataataagtatttgatatatctacactgcattaattactgtacataatctagggatggattaaccacacaatacaatgtgtgtaggttatataccaataccacaccattttacaaaattaaaaattattttactttttgtg

SEQ ID NO: 109 - protein, 128 aa, Mus musculus
MVLLAGPGPEGGGTRCLSPQSPTPPRSEQTGEDPADYEEYEDFSSLPDTRSIASDDSFYPPGGEEEYGSVSAESVPEGVPEAATLLRAACANDVGLLRALVRRGPSSEEVRETDRNGRGSAAGPYGLR

SEQ ID NO: 110 - DNA, 3031 bp, Mus musculus
tgactttgcaccgggagcgcagccgcctggagctgctttctgccaggctggagcgcgcggggctcctgctcttctgcgaacgcaggggccaagggtcggtgacctccgggcgcgccccgttttcgtgtcccctaattcgagccccagcccccggcccgcgccttggcctccagcatggtgctgctggctgggcccgggccggagggcggcgggacacgctgcttgtccccgcagtcgccgacgccaccccgtagcgagcagacaggagaagacccagcggactacgaggagtacgaagacttctctagtctgccggacacccgcagcatcgcatcggacgattccttctaccctcccggaggcgaggaagagtacggctcggtgagcgcggagagcgtcccggagggcgtccctgaggcggcgaccctcctgcgcgccgcctgcgccaacgacgtggggttgctgcgggcgctagtgcggcgcgggccgagttccgaggaggtacgggagactgaccgcaacggccggactggccttattgttgcgtgctaccatggctttgtggataccgtggtggccttagcagagtgtccccacgttgacgtcaactggcaggacagcgaagggaacacagccctgatcactgctgcacaggcagcaggggcagatgttcaagcaagggatccccgtcgtgggctgtcaccacaggagtgggctgcgtacacaggccgagcggaggctgttcgcgtcattcagaggctgatggagcgaccctgtccagagcagtttggggacaagtacaagctggaattgccacttcccgctgaggcggttttgaagaagtcaggttccaaaaactgcttgcagagattcaccgcgttcctgcggtccactctgacctctcgctcctcaggccagagcctggaggatgggggcgtccttgatcacatggtcaggatgaccacgagcctctacagtcccgctgttgctgtagtctgtcagacggtgtgccctgagaaccctccctgtgtggggaaacgacgcttggcggtgcaggaaatcctagcagctaggggcaacctgaacgcccaagcgcaggacagcaacaaggtagagtgctctgagccacaatcccagattttggagactcccagagctagctcccggtctcccaagtcgcccgcggcatcgaggtccactcctgcccctgtcactcggaaggccagcctcctgcctttgcagttgcttcggagaagcagcgtgcggccgggcgtggtagtccccagagtgcgcatcagcaaggcacctgcgcccaccttccagccagagcgcgcagcgtccaagggcaacaccaaggacagcatctacctgcagatccccaagtggcggtacaaggaggccaaggaggagaagaggaaggcagaggaggcggagaagaagcgccaggcagaggctcagaaagaaaagcgggcgccacgatggaggaaaaggacgtgaaggggctatgactctcatggcgcctgtgcttggtgcgggggaagcagcataggggtccttcttgggaggctgcaggcgggctctgtagacagcaccagagagggatgctcctgttgccatgggtgcatgctgaatcacacagcctcctggtcattcacctttcctagatccactaaggacggtcctcattgctcccaagacagaactgggaaaagtacgggtggttttgattaaaaccagttccctgagcattctatacactaagaggtcagtttacctagaagtcacccttaaagaaccccaatcaagaatttaaaaccccagtttatcaaagggcattttcacataattttgtatcttgttatttatgaaaaattgcagcattttacaagtgatgggctctttataattaagtcagttttaatacttgtatttgtttaaaatgctgtgtctagcaataaatacttgtaatgactgtgtgacttacacagaagggattctccccttgccatttggttctggcctctgccttctcgtgtcctatggccacacctgtgcactggcttttcctattaacttgagtgatgccaaatgcctgtttttacttgagaaaggcaccggcttctatccaaaccgatcaagtgagatatgaagtcttacttcctttcattctttaaaattcttttgttcctaccagcccctgaccccctgccaatcaatcacttcatcaaaactgattatggcacactgcagaaatattatgttgctaggggcaaactcattttaagcaaggggcttggatagatccatcttccagggggtttgaggaagacgatcatttaatggaggcaggtcttaatggatgagtagcataaacaaagtcatatacgcttacaaagagcacaagtggatctttaaaactgtcaaagatgcagagggtaggacagtcagaatgctgccaactgttgaagggctgcatttttggaacaggtgctacacactggatactagacagggtagtttgggaaaggttctcccagagtaggcaacactctgatggtcgccatctccttcagattcaagtccagagagtcccttgtgtgtctttctactgatagttctccattgatgactggccctggtgtttggctcatgcccacgcaactttatagaacttccagtatgtggggactttggcagggcagcgatgggatttatcccgggtgccaacacatcggtgagagtttcctttccatttccaaagcactgagaagtcccagctgggtcttagagtatctgttgcacaggcactttatttgaatatttaatgtaaagacttggacgctatagagtcagaatattgcaggctgatttggaagctctttgctgaggtctgtcttacacagggggtggggtagcaaactggcttaagcttatttcttcctaattggtaccattaagcattaaataacattatctcacaccagccttccccaaaacgccccaaaacaggaccctaagcctgttcacaggt

SEQ ID NO: 111 - protein, 432 aa, Mus musculus
MVLLAGPGPEGGGTRCLSPQSPTPPRSEQTGEDPADYEEYEDFSSLPDTRSIASDDSFYPPGGEEEYGSVSAESVPEGVPEAATLLRAACANDVGLLRALVRRGPSSEEVRETDRNGRTGLIVACYHGFVDTVVAECPHVDVNWQDSEGNTALITAAQAAGADVQARDPRRGLSPQEWAAYTGRAEAVRVIQRLMERPCPEQFGDKYKLELPLPAEAVLKKSGSKNCLQRFTAFLRSTLTSRSSGQSLEDGGVLDHMVRMTTSKPAVAVVCQTVCPENPPCVGKRRLAVQEILARNLNAQAQDSNKVECSEPQSQITPRASSRSPKSPAASRSTPAPVTRKASLLPLQLLRRSSVRPGVVVPRVRISKAPAPTFQPERAASKGNTKDSIYLQIPKWRYKEAKEEKRKAEEAEKKRQAEAQKEKRAPRWRKRT

SEQ ID NO: 112 - DNA, 2404 bp, Homo sapiens
atgaccccgccaccgcagtccccactcctaggcacacaggtcgaggaggaccgcgctgactacaaagagttccaggacttctccagtctgcccaacacccgcagcatcacctgggacgactctttctaccctttccaggaggaggaggagcacggcgtcgagggcgtggagaacgtcctggaggagggcgtcctggaggcgtggggctgctgcagacgttggtgcgccggggggtgagcgttgagaaggcgcaggagactgaccacaatggctagaccgaccttgatgtcgcctgctatcacgactttgtggatataccctggtggccttagctgagtgcccccacattgaagtcaactggcaggacagggaggggaacgcaaccctaatcatagctgcacaggcaggagctgcccttggccccatgggcacagttgccttagacactggctctcacctttgtgcttcctgcatcagcatcacctggcatggttcatttgagctttaacacagatctggtggaaacacaggctgccaagccctgcccctggagtctttctttgaataggcctggggtggggcccaagaataagcagaagaacaggtttcctggtgaggctgatgccgctggcccagggatcccacgttgaggacggaggtccttgaggttttcatgcctgatgatggccaggaacccttctcagtaggcattgaagaccagcagagtcccagaccccaggagagttgtcgtcagacggacacagaggcatcacggaattaaagtgaaaatgaagaaaggagctgagcatctgtttcataactttcctgcgctgttttactaaagaggctgttctggcccagtcagggcactctatcatcaccaactacttgttgaactatgtcctgggtcttgaccttgaaggatgcacgcgttcgggttgaaagcctccatgcagggtggaaccgatcgcatccgagccctgagctagcaggggcgggtgtccacgcgagggcccccgccgtgggatgtcgccagaggagtggccacttacacgtccgcctcatgcagaggctcctggagcgcccctgccagcagcggttggggaaaaagtaccagcttgagctgcctccgctccacgagagggcgcggaagcccaagggctcgaagaactgcctgcagagggtcagggactgcgagctgtccgtgctgacgcggcgttccgtgcgtggcccggaggaccggggcgccctggaccacatggtcaggatgatcaccagcctctaacagccccgccgtggccctcgcgtgccagaccgtgtgcccccagagctccctgtgcgtggggaagaggcggctggcggagcaggaaatcctggcggctgaggaaattctggcgacgcggcggggggtggggaggcaggcgcaggaggcggacgaagcggagggcgcagagcagcacaagcggccctgcccagaagccgcgggctcccggcagggctccccaagagccggcctcccacctgccccgctgccggggtcctggggctctgtcgaccccgccccgcggaaggccagcctcctgcccctgcagcgcctgctgcggagcagcttgcggcctgacgtggtggtgccccggatccgcctcagcaaggcgcccgcgcccaccttccagacccagaggccggcgcggaagggcagcaccaaggacagtggccacctgcgaatacccaactagccttacaaggtggccacggaggagaaaccggaggctgaggaggccgagaagaagcgccaggccaaggtgcaggagaagcgcccgccgccctggaagaagaggacgtgagaatccgcgggtgcttgacacggggttcgagggcagggtgaggccgcggggctgagcaccatggccgctcccgggaccaccaggccgcgcgcgtttccacgctgtctttctagaatgctcccaggaaggagctgggggagccacatcgattcgcctgacaccagccaccctagcaatcagtacacctagcgggcatgttgcctaaaaggctccctttagagaacctcaattaagatgtttttaaagatcaatttattaggccgggcgcggtggctcacgcctgtaatcccagcactttggaaggccgaggcgggcggatcacctgaggttgggagtctgagagtagcctgaccaacatggagaaaccctgtctctactaaaaatacaaaattagccgagcatggtggcacatgcctgtaatcccagctactcgggaggctgaggcaggagaatcgctggaacccaggaggcagaggtggcagggagccaagattgcgccattgcactccggcctgggcaacaagagccaaactccgtctcaataaaaaaaacctcaattt

SEQ ID NO: 113 - DNA, 820 bp, Homo sapiens
tcagggcactctatcatcaccaactacttgttgaactatgtcctgggtcttgaccttgaaggatgcacgcgttcgggttgaaagcctccatgcagggtggaaccgatcgcatccgagccctgagctagcaggggcgggtgtccacgcgagggcccccgccgtgggatgtcgccagaggagtggccacttacacgtccgcctcatgcagaggctcctggagcgcccctgccagcagcggttggggaaaaagtaccagcttgagctgcctccgctccacgagagggcgcggaagcccaagggctcgaagaactgcctgcagagggtcagggactgcgagctgtccgtgctgacgcggcgttccgtgcgtggcccggaggaccggggcgccctggaccacatgaccgtgtgcccccagagctccctgtgcgtggggaagaggcggctggcggagcaggaaatcctggcggctgaggaaattctggcgacgcggcggggggtggggaggcaggcgcaggaggcggacgaagcggagggcgcagagcagcacaagcggccctgcccagaagccgcgggctcccggcagggctccccaagagccggcctcccacctgccccgctgccggggtcctggggctctgtcgaccccgccccgcggaaggccagcctcctgcccctgcagcgcctgctgcggagcagcttgcggcctgacgtggtggtgccccggatccgcctcagcaaggcgcccgcgcccaccttccagacccagaggccggcgcggaagggcagcaccaaggacagtggccacctgcgaatacccaac

SEQ ID NO: 114 - protein, 261 aa, Homo sapiens
MSWVLTLKDARVRVESLHAGWNRSHPSPELAGAGVHARAPAVGCRQRSGHLHVRLMQRLLERPCQQRLGKKYQLELPPLHERARKPKGSKNCLQRVRDCELSVLTRRSVRGPEDRGALDHMTVCPQSSLCVGKRRLAEQEILAAEEILATRRGVGRQAQEADEAEGAEQHKRPCPEAAGSRQGSPRAGLPPAPLPGSWGSVDPAPRKASLLPLQRLLRSSLRPDVVVPRIRLSKAPAPTFQTQRPARKGSTKDSGHLRIPN

SEQ ID NO: 115 - DNA, 1936 bp, Homo sapiens
atgaccccgccaccgcagtccccactcctaggcacacaggtcgaggaggaccgcgctgactacaaagagttccaggacttctccagtctgcccaacacccgcagcatcacctgggacgactctttctaccctttccaggaggaggaggagcacggcgtcgagggcgtggagaacgtcctggaggagggcgtcctggaggcgtggggctgctgcagacctgagtgcccccacattgaagtcaactggcaggacagggaggggaacgcaaccctaatcatagctgcacaggcaggagctgcccttggccccatgggcacagttgccttagacactggctctcacctttgtgcttcctgcatcagcatcacctggcatgaggctgttctggcccagtcagggcactctatcatcaccaactacttgttgaactatgtcctgggtcttgaccttgaaggatgcacgcgttcgggttgaaagcctccatgcagggtggaaccgatcgcatccgagccctgagctagcaggggcgggtgtccacgcgagggcccccgccgtgggatgtcgccagaggagtggccacttacacgtccgcctcatgcagaggctcctggagcgcccctgccagcagcggttggggaaaaagtaccagcttgagctgcctccgctccacgagagggcgcggaagcccaagggctcgaagaactgcctgcagagggtcagggactgcgagctgtccgtgctgacgcggcgttccgtgcgtggcccggaggaccggggcgccctggaccacatggtcaggatgatcaccagcctctaacagccccgccgtggccctcgcgtgccagaccgtgtgcccccagagctccctgtgcgtggggaagaggcggctggcggagcaggaaatcctggcggctgaggaaattctggcgacgcggcggggggtggggaggcaggcgcaggaggcggacgaagcggagggcgcagagcagcacaagcggccctgcccagaagccgcgggctcccggcagggctccccaagagccggcctcccacctgccccgctgccggggtcctggggctctgtcgaccccgccccgcggaaggccagcctcctgcccctgcagcgcctgctgcggagcagcttgcggcctgacgtggtggtgccccggatccgcctcagcaaggcgcccgcgcccaccttccagacccagaggccggcgcggaagggcagcaccaaggacagtggccacctgcgaatacccaactagccttacaaggtggccacggaggagaaaccggaggctgaggaggccgagaagaagcgccaggccaaggtgcaggagaagcgcccgccgccctggaagaagaggacgtgagaatccgcgggtgcttgacacggggttcgagggcagggtgaggccgcggggctgagcaccatggccgctcccgggaccaccaggccgcgcgcgtttccacgctgtctttctagaatgctcccaggaaggagctgggggagccacatcgattcgcctgacaccagccaccctagcaatcagtacacctagcgggcatgttgcctaaaaggctccctttagagaacctcaattaagatgtttttaaagatcaatttattaggccgggcgcggtggctcacgcctgtaatcccagcactttggaaggccgaggcgggcggatcacctgaggttgggagtctgagagtagcctgaccaacatggagaaaccctgtctctactaaaaatacaaaattagccgagcatggtggcacatgcctgtaatcccagctactcgggaggctgaggcaggagaatcgctggaacccaggaggcagaggtggcagggagccaagattgcgccattgcactccggcctgggcaacaagagccaaactccgtctcaataaaaaaaacctcaattt

SEQ ID NO: 116 - protein, 258 aa, Homo sapiens
AASAPREGAEAQGLEELPAEGQGLRAVRADAAFRAWPGGPGRPGPHGQDDHQPLTAPPWPSRARPCAPRAPCAWGRGGWRSRKSWRLRKFWRRGGGWGGRRRRRTKRRAQSSTSGPAQKPRAPGRAPQEPASHLPRCRGPGALSTPPRGRPASCPCSACCGAACGLTWWCPGSASARRPRPPSRPRGRRGRAAPRTVATCEYPTSLTRWPRRRNRRLRRPRRSARPRCRRSARRPGRRGRENPRVLDTGFEGRVRPRG

SEQ ID NO: 117 - DNA, 228243 bp, Mus musculus
  misc_feature (1)...(228243): n = A,T,C or G
acgcagagcgcgcgcgggtcgtttcagccacagaagtgggctgaggaaaggagtcggggtctgggcgtgcgacgttcggctagatatcaccgagctaggtgggacagccaggtaagatccaggaggaaccgtgataggggtctagccggcgttgtcgcctccctctgtgctctggggacctgggcctgagcctcttcacccgcagcaactagacggaggcgggttatgctcacatatgatcacaggttatgtgatcaaaacaaaacaaactgtttagaactgacttttgaaactgaggcatgaacaggtagctcagatggactcaaggccacaggtgccatttcacttctgcaggtgaagggatgtggtagcctcggtgtgaaaaaagaggggggaagcggggcgggaggcaaccttcttgggcacgggcatgttggtggtgacccggaaatggtagtagtttttattattactttggtaacttaacggatttagtcctgctcatttcatttttgtgaggcgacgttttatatcttctaatgcatgttccagtttaaggagatcccagcatgaaggaatggtagaagtcggcaattagccgtattaagttatatagtagagatgtgtgttaggaactgagaaggcgtgtggaagaggaggagccgtgggcgagggaaggtttcagagagaagggtgtatgcatgctgaaaacggagacacttcaactcttgtcgtatgagatcaccttggatttaaaggcggtcgaacttttggtttgctctatgcctactgtaatgctgtgcagaaacgtgttttcctatttaaaactggcttaacttgacagcaactctttcatgaatataagggaagcaaaatagtgtgctgagcccaataacttggtgagacttcaggaagtgcttaactttgttgtagattgtcttggaggctataggtactggtaacaaaaagatcggtgttattggaaagaggatccaagaaggggttggtgtaaatcagtgtttcttaactaatgtgatgattacgctttgtcttcagatgattccttgtggtgagagactgtactgtacttgctagaattctatcaattccatagatgctggtctgtgacaccccccaacccccctccagtgccacagtcaaaaatgcccccacgtgatgttagaagttccctgggggaggtgttaaacctccaaaccctaggttaaaccaatccccaaggaatagtgttagaatgttcagatgtcaataaatgaaatactatatctatgtagtttcaaaagcatcagaaactgatgtcgtagaggctgagaattcccgaggccaacttaccatcagattcagtgtctggtgaaggcatgctttctggcttgtaaatggcatgcacttgctgttttcttgggtggtagaaaagcaagagagcccttggagcacccgttataagggactaataatgttctggagggtgtagctagtcacctcgccaaaggccttatcttctaaaaccaccagtttggacattaggatttcagtatgtaaagtggggatggggacccaaacatttagaccttagcagacagatgagactggaggaggcggggaagtgaagagtatgtgttggggaaggtatggggaggactagcagttgtggattggggctctagacagctcttggaagagatggaaagagctaagagcccaaaggagtgcaaacggaaatattgttccctgatgtcttagtcgtggtttctattcctgcacaaacatcatgaccaagaaacaagttggggaggtttatttggcttacacttccatactgctgttcatcaccaaggaagtcaggactggaactcaagcaggtcaggaagcaggagctgatgcagaggccatggagggatgttccttactggctggcttcccctggctttctcaccctgctctcttatagaaccaagacttccagcccagagatggtcccacccacaagaggcctttcccccttgatcactaattgagaaaatgccttactgttggatcccatggaggcatttcctcaactgaagctcctttctttgtgataactccagctgtgtcaagttgacaaaaaactagccagtacacctgaggaaggcatacagattgcagtagtggccttgagagcaggtcccgtgaagtgggagaggtgggagcctggcagactcccaggccaggactggaggacaggactttgaaacaaatggaggcacgcctatgggagagttttgctgccaggatgaaggcagaagcatgggaagtcatggaagaggaaggtgggggagatgcttttctttaagattagagaaagatgtccttggtttgctatggagagtggtgtggtgtgggcgaggagaaagctgctgattgaggagagcaggagagcagggaggaatacagagagaaggaaaggagatctgatgtggaatggaggtggtctcagtggacgtggttagttcattcaacctgaaaagaaaggagaacataggaaccgaggctgctgggcggggagggatgcccttccgtggtggtttatgcttcctcagtgaaatagcaatcaaggtctttttactttttacttttttttttttttccaaagacaggatttctctgtgtagtcctggctgtcctggaactcactctgtagactaggctagcctcgaactcagaaatctgcctgcctctgcctcccgagtgctgggattaaaggcgtgcgccaccacgcctggcctcaatcaaggtctttagctctggtctttagtgctaatggatgaggagatgtcaggcgtctgtagtatcagctgtcacggagtatttctatgttaggtctggagggtgggtcatgcctgtagtctcagcatttgagtggcaagtgggttgccatgagttcgaggcttgtgtggactacctagtgagatcctgtcagaacagcaaagacagaaaagggtccattatctgtcagcaggaagtagctcctggagagttgtatgctctttcgaactgttgttgctgtgtatttttatacgtcttttcctctctttgagggctaagtgggacagctcatctgtcccttcattttacaagtaatctctgctgtttcaataatatatttgtgcgtctggtccctaccaactgctgagctcctgggaaggagaggctgagtatgtctggtgcctagaatactgcctggcatatgagagtttctcattgaattagaataaaccaagtagcatttgaaaacaaaagtcttgggttatttaccatgaaagccactatgctcagagaaattgcctggtatttaagaagatactaaatgtttgttacccaagctatttgagtcagaagttaatgatattttgaatattgatgttaagctgatgacctcagagataaaagaccttagccctttcctatcctgtattttttcatgagcctaagaatttacttggtaagacattcaatacctatttgtggaaaaaaatgaacatctctaactgaaagcaatactagagaaacagcgagcggtaggagcccaggtgtcaaataaagctagtgttatgggaggaggaagtgctggagataccacatgactccctgcgcttgaaggaagaggatgagtcggatgcagaccatggaccagaagctggaccacaccaagcatatggctcctttttttttccgaagaggttctgaaggacttgccaatcagcttgtgggtctcatgagcctaggctcacgtgatagctctctgatttcaaaagaccattctcctttatggggccacacagcttcagtagcagcctgcttgacattttaaaaccacttcgaactttgcacttttctagttgctttcaatggcttgaatttcaggaatttccttacttaaatatgtctagagatgcaaggggtacaaaacttaaagagttgttgtttaaaagtgtaaacaaaggagtgtttaacatgagagtaataacttcagctataatatataagccaccataagaagagaggtctacatagaaattctgcttttactgaacctgggataactacaggtataaatctattagaactcaggaaggctatcagaaacagtttttttttcttttttaagacttcaaaatgcacatatatacatacatattttttttcatttaagacttcaaaatgcatatatatacatacttcaaaatgcatgtatatatatctgtataacactaaaagctatagtttttttttttaatcttattaaactttatttttttctttttccccctctttttctatcctctatatgtgttaagtgtctaagaactgggttttggagagttgaagcatcagaaaaaagggtattctttttaaaaaatgaatatggttaccttccctatgttacactgagggtgtgtttttgatgtccagatgatggcacagtgcttgggtgtcctctgggtattgcatgcaggaacagtgtagcactggatattgaatatagtcattattgattgctatgctcttttcctgtacagtaattattctgactgagaactcttactgttgtgtttgaaattttaggtaacaatttcaagatgccaggacggtccagtacaagttcaggttctacccgttacatatccttcagtggcatagagtcagctctctcctccttaaaaaacttccaatcctgtatcagctctggaatggacacagtttctagtgttgccttggaccttgtggagactcaaagtaagtcatacttacatttgtgtgtgtgtgcggctgtccactctgaggtaacagtgtggttggttgcattactctgagggtgccctttgagcattcttgggataagagttcaattacactggacacattttctcatcttattctgtaacatctcagagccaagtagcacagtaatcctccactcagaactgccctagaaagctgtgaacacagatattgtggttccttgctgcaagtatgcagtctaaagtgtgtgatacgtgtgaaccggaaggtctgtaagtgtgctgggacaacactcttttccattaggttaactatatgttgttcgtgctagattactctgcacgtagacttgacagatgccagggatacctaagcagggaaaacctcagccaaaagaaggattcagctttggtgaattctcacttttcaagcagaagattgagaacaagggtctttgctttttttgagttagaggtattattactttctgacatattcagagccagggaagtggcataatatcccccttcccccttttaaaaatggtactgtttttgaacaatttgtgatgtgcattttttcctttacttatcctgattgagttttaaggctctaaaaacgtaatgtttatgtcaagttggaagaatttctgtactgtttcttcccatagttccctgtctccaggttcctttccttttaggatttcagctacagtttcgagagctgtatgtgctctactgcccaaagcagctttctgtctcccctctgcagtctttaaaaaaacaacaaaaagagtgtgtgtgtgtgtgagagagagagagagagagagagtgtgtgtgtgtgagagaaagaaagaaagacagagacagagagaatatgtgtgtatgttagagagagagtgtgtgtgagagagagagaaagagagagaatgtgtatatgtgtgtgtatgttagagagagagagagtgtgtgtgtgtgagaaagagagacagagaatgtgtgtatgagtgtgtatgttagagagagtgtgtgtgagagagaatgtgtatgttagagtgtgtgtatgtacgtatgtgagagtgtgtgtgtgtgtgtgtgtgtgtgtgtgtgtgtgtttgtgtgtgtgtgagagtgagcgatggacatgtgtgcacatgccttgcagtactgtgtagttcagacaacacttctgtggagccagctctttcctttcccctttgtgtggattctagggtgtcagactcaggtcatcagacctgcatcgtagtctgaggcatgttgttggccccggcttcatcctcaactctatgaggcatgtttctagtagctttttaaaatcattgtctgtcattactgccctttttctcagtgtcattctagttaatttccttgtggatacaatgttgctagtttaagttttgttgccttctgtcatagtcggcttcctttagctgtcaacttgaaacaaacttggtgtcaccttggaagacatagcctcaactaaagtattgtccagatgagatttgcctgtggccgtgtctgtgaggcattttcttacttgctgattgatgcagaagggcccagcccattgtgggtggtgccatctctaggcaggtaggcctgggctgtattaacaaagtgatggagcatgccaggaagcagtgttccctgcctggtttgtgcttcaagcttctgctttggcttccttgacagatggactataatctgtaaggtgaaataacccctttcctcctgaggtagctttggattgtgatgtttatcacagcaacagaaaacaaagaaatatctgttaaagagagttgaagtttgttttggtggaaagccaaaagtttatggaccagtattgataatctttgttaagggtggacataaggtagctattcttggttgtcaacttgactacatctggaattagctaaaactgaagtggctggggctggagagatggctcagtggttaagagcaccgactgctctttcagaggtcctgagctcaaatcccagcaaccacatggtgactcacaaccatcagtaatgagatctgatgccctcttctggtgtgtctgaagacagctacagcgtgcttacataaaataaattaattaattaaaaaaaaacaacaacaaaacgaagtggctggatacgcacatgtgaggaatttttttcttaagtcatttcaagtgggaagacccacttttattctggatcttctgaggtgggaagatcctccgtttatctgccggcagcctatatgaaggacatggaagaaggaagcttatactctttgcctgttgcctctcacttccactggcaaatctctaccctccctggctttacagcctactttggggttccagagtatagtggagatcagctgagatatctagcctcgtgaactggctgatttttggaccttctgttggtagacagctattgttagactagtggaccacagcttatttctctttctatagagcttcactctataaattctgttcctctacagaactgtgactaatacagtgaactttagtaaggttaacatcatgtaacaaagtaaggccactggagccttgattgctttgagaattcagcatcttagcttgactctgggtggatgaaattcaagtgtctcccagtattctctggacttgggtattgtttgcttcatagttcctcagtgtcttaggattcagtatcggactcaagggaatccctgtgctgattcatagctcactgccagcattctgtcttgcaagctcctgccgctgcaagcctcctgattcttctcattctgttaggctgctgtgttccatgtggacccttcccctctagtgcttgcaggaagggagggactgaaggactagtctccagccagatgtttcctatctgtacttattatcattctggtctggttattgtagcatagtctgaaagtagtcatagcatatatttttatccagctcttgtaattattctggagaagatgaccatctcaatcccagttattcattcatgattaagcagcagaagtcacctgttatcttcggtcacctgtgacctcttaagtgtcttaaccctgcctcgtctgatgcagaacctgctcttggtgatgatgggtattttgctttttgctgaaatcataatagaaccttaagccaaaagagaagagcgagaatacaatcctggagagtatctgatcaaaagtttctagatttaagctaaaagtttaaatataccgggcgtggtggcacacacctttaatcccagcactcaggaggcagaggcaggtggatttctgagttcaaggccagcctggtctacaaagtgagtttcaggacagccagggctatacagagaaaccctgtctcgaaaaacaaaaaccaaaaaaaaaaaaaaaaaaaaaaaaagcttaactattttggctccatccatccacctatgtggttttttttaagacatgatttctctgcgtagcccaggttgtcctggacttagtttatagtcaagctggtctggaatttacagagcttctcctgcccctgttcccaagtgctgggattgaaggtgtgtactaccacccagtcagaattctttatttttgccttaagtgagaagtatagtgttggtataaaaatgcagttcctgcggttttcttttatttgagaaagagtttcattgttgccaagtctgtcttgaaactccctatgtggaggaggctggccatgaaatcttcccttgtcttcctactcctccttccacaggatggcttacaagtttgcatcaccatacccagctacttctttatcatttgaaaagaaatgctaacaactttttcaaaaaaaggttcataatgtaatttggggttggtaaatttttatctgtgacgggccagattgcaaatattttcaaatatttctgagccatgaggtctcataaactctggtaagtgtgctattgtaaagaccgccctagacaatgcataaaggtgtggtagactgagtgagagtggccttcataggctcatatgtttgaatacttggtctcacttggtagaattgtttgggacgctaagaggtgtggccttgttggaggaagtgtgtctgtcacaggggatgggctttgacgtttcataagacttgtgctttctgggtatgctttttgtttgtggttctaggtgtgctctcagctgctgctctagccccctgccgccttccttctgccatcatggactgttattcctctagaagaatacaccctcaatacatttttgccaacaagttgccttggttttggtgttttgtcacaatagaaaagaaacaaatataaatgggaatggtgtattctaaaaaactttatttataaaaacaggaagtggaccagtttgggttatagcttgccaacccttcctttagagccacagtttatcaaatattcattaaaatttattttggggctagagaagtggcttagtgtataagaacatttgttcttgtacaggacgcagatttgattctcagcacccacgtgctaactcaaaagccaccagaactccagttccagatctgaccctgtcttctaaccttcatgggcaccagccatacatctggtggacatacatgaatgtagataaaacgttcatgcatgcaaataaatctatttttatttggattaattttgcagcaaatacttgttttcttaattaaaaatcaaacttaagataaattttgactaagttgtatggaaaagaaacacatgagctgaagagtctcagtagatgcacatgcagagtgaagagtagcctggagtaccaaatttgaaatgtatatacggaagcacacttcatacgttagttaataccaaggtagttgatgcacacttacaaagaaactattctgcctctaattcagtgctgtgatttaaaaaggacacagaggattattaagtggttcttcccttcacaggattcacagtctcaattggaaaacagacatggattaaaattccaaaagggatacaggtaatttgctatcactagtgagctctcaataagggtgcccatagattattcaagattggaatttttgtttaaaataatcattattagcaacaaaagctgataggtgttgtcctttcaattcagactcacattctctattttcagtagatggttacgactcagtgagcctagttagcctattatagctattctttgcaattaaaggaaccgtggaaacacagctatattagcctgtagcacacccaaagcacattcctattcagccagcagggtagaggtgtttcatacacacttactacctgattgcaaagtatgaatgaatatatatatatattattagtcaagatatagtagatatagtaagctgtgctagttgatcacagacattcttaagtgaaagtgacatttgctatactgtcagttcgtgagggagagtggcacattgactttcatattagtgaccttcggtgccattgctgagtttattctaaggcatggccagtattttcctataaggcttttgtgtaatcaagaataattttgtatgaattctccacatgattagaacacatgtacacacatcctccaattactatgagcatggttttgatctgtggacctgtggtttctaagccatagtctgtcagcctctgccttctgaaactgagtttgaatgctaatgagcaagaggcagatggcattcgaaagtgtttttggacaaaaaacctctgggcaactgttccccataagagttggttaggagagatttttttttcaattaacattttggcttaatataattaaatataaagcatatgttgtctattaaaatgttacctaaaattcaaggaaattttggtatatttccaaattgttagtgtagctttccattttcacaggcattttccagaatatagaatagcctcaaaggaaaatcatagtctgttgtatgttaagtcagttcctcatggcccaaattatataaaaatagaattacaagccctctcaaaatttttatagaaaaatgtaggttttaatttaagatatttttttctcagtaccttttaaaaattggcaaataagagtacatatttttggggtatcatatggttcactacagacctatactgtacaatattcaaaccgttttatgcatatcttagacattatgatcgttacttataacttgtcaggttgatacaacatgatatcatctgatatttattggattatgcatactatatgtataatgaatacatatatatatccagtcagacattagaaaggatattagaaaggatagaattgtgttaactatgagaacatgggtgggtctggaatgcatagtatttgaatgaaataaccaggttgatagatacttcggttgagtatttgtatttgtacgttttatctgtttccctcggattctgaagctctgaggcagaaagatcatagttactcggtcagacagtatggtttttgatctgtgtccaagtatagtattattaatggtagtggccataaccataaagtcagtatgcgatttgttttagactttgagtatgctgggtagggtatgtttttacttggattctcacttgatcccatcagcagtctcatgacatagaaataaagttatcataactttctgaatgagagaggtctggcttaaaaaagttaattactgtttctaaagccacagaattagaaattaatatggttcagatttaagcatagaaaaatgaaccattatgctttgtcataaatgctttgtggttgcacatacctttaatcccaacactgaggaaatagacgggcaaatttctgtgaatttgaggccagcctattctatagagagttctaggacaaccagggctatatagtaggaccctgtctaaaagaaaaaataaaaatagaaaaaatatgataaaaacacactgtatgaaattctcctaggggtgaaaaatgtaagtccaggttggccttccagtcattttgcttaccccacaggcagagttgacccatgaatactctgcacctgagcctagaccttgaacacacaagacctcacacagtgtatggaatgattgtgtcagtcctaagaggaagtttactataaattttttcctagttatctaactccttcattatatttatatctatgtcaatggagcacaaatgccattttcatgtactttatttaacacacacacacacacacacacacacacaaaatgagagaatgtgagaaaataagaatgagagcaagcagtgggccattttgtcctttaggagttgccataggcgcttaaaaaattgggtgttataatttgcattctgtgtggtactgccctctgctggcttttagttgtcatttccaacaaagggagccaataggaaaatacattacatacatcttaacattctaaaatttctccaagtgcaactgcctaatataagaacaaaattatttctgaagtgattataaaagttaaatcaagataatgacatggatatgcatggatagctcctccacaataaagactagtaagtcgctgctgcctgggatgtgtgtatacacacacacacacacacacacacacacacacccctacgcctacacatacattcatacctacgtgcatgtgtccacatgttaatgaactttggggttttggaaatttggaaattggtacaggcagtgttcaggcttcttttggcaaacaattacttgatcttttgttgctctgcctttccttgtattcagagggtctcagttctgtagctggcctgtgttgtcatgtccctgagggtagggttcatgtagaggcatgtacttcctgcccagtgcctggtcctggacttatatgttttaggttctctgtgaatgcttattgagtgactcagtcagtcaagcatttaaagcatttgggtgttggagtctaaaagctgtggttggagaagtgacttcccctctggatacaggcaagtattgctctaacacgcttctgcccaggaagctgagagctggctgttgagcaggtattagcactcttggacattctatagcaactttttatccaagttcagcaaaaggccaaaaaagctagtgtttagtgtagtattagagttgcctacttcctgtgctggtggaatttccctacattgtgatatatgtcttagaaacgtgtgaggtgtgcatttaactgtgctattagcatctttcttaatcctgccctgggatatacctcctggtgtagccattttcaaagcttctgttgggagagaagcaaaggagctacatagataagttaggcccattctgccaggtgagaaggttcaggaagtgaccatcgctgagtgagagaaatagccttatcctccatctgtcagtagggaactgagtctcacggagttgaagtaagttaagcctaggatgcagaaagagaatttgaatttgaacccaattacctgtctctagctcacacacacctctgacccctttttaacctcgtagtagctgttggtggacagcagtaaccctcaacaactgtgtcagtcagctttgtgtcaccattacagaacatctgagctaattcaattaaaacaactttttattgttttggaggttcccatctatgatctctagggacctgtggtaagcagcacattgtggcaggagctcacagtccctgccagcaaacaagaaaagaggaagaaagggtcagcatctcaattcccattcaagaccatagcactagcaaccgaagcacttcacagtctttcaaaggttctacagctacccatgatgccttccacgtgcacccatttaaaacacaacagcttttgggagcattgattatccaaactggagcaactgctcttagtgatttgcccagcacagtctgctgtgctttctgtagttcttaatcagtttatggagtttgtagtattttaggttaaaaatgagaaaacctaagtcaaaatgctattttttggatgggcataatggctaatgaacagctaacgtgtttgagctagcaaagatggcaaaggtccctacactgtccagcacagagccttgtgagtcttgtgaggacaagaggcagtgggggaaggtgttagagattgttaagagaaggtttgaaaaggaaaagagaaaagctgttggaaatatcagtgtaggccgttcttaaagtgttggatttaactagctgtttcctgcgagtctgggcatatgcattgataggaaaaatagaggcaaagtagtaaagcaagtctctgatgctctcgtgtatttgaggtgtgggctataagccacatggctcttcacagttatttctctccacagtgaccttcttgttctgtaccaagtgaattaaaacagtgggaacactgaagtacactgtgggccttgttttactgaaccttgatgttttctaagttgatatttaaggaattgtgaagatttatgttctgccctcatgtatgcctgcttgccagaagagggcaccagatctcagtatagatggttgctgggaattgaactcaggattcttaacctccgagccatcgctccagccctgttccttgtgtttttagccacagtaatgggctacctatcctttcatactgatagcagttaatgctttgcttttgttccatgtagctctttaatttaaatgatttctttgtaggtatgttggttattttaatggtaggaaccccttaaaatggactttctggggacaaagccctctggtgctcattaagtaccttaagagtttggaaccactataatgcatatcaggtgtcgaactatgtaaatagggtggtagatggcctggggagggggagagggcagctctagctctcttgaaactcactctgtaacccaggctggcctcagagtgagaactgcctgcttctgcctcggagtcccaagcactggggttaaaggtgtgcactaccacactggatttgtaaatggcttttgaggttgttccttaataagatatgtttggatctataatgaaaaatgagttactgtttacagttagaaaatgagctcatttattaatgaataaaaatcattttagagactttgcacttgaggaccagaagtctctaacttgagagtgcatcagaactaccgagaggcctcatgaaagtagatgactggtatttacctccacagtttcagtaattctgaatagtgccggaatttgcatttccaagattcccaggtgctgctaatagtctagggactactacagtttgagaaagttagaccagtcagtctgtcccatgctgtaggagacctgcctgccactagatggcatcagagcactttttagagcatagtcattgacctaagtcttaagtctcttgatcagagtgagtgagttagttagttagtttgtttgtttgtttatttatttatttatttatttatttgtttattttggtttctccagacagggtttctctgtatagccctggctgtcctggaactcactttgtagaccaggctggcctcgaactcagaaattcacctgcctcccgagtgctgggattaaaaggcatgcgccaccacgcctggcgatttgttaacttttataatcactttaaaatacatacatattcataattttgtccttttttcagttgaaacaatgtagaaggttaaaagtgtgaaacacactgcccgttggctttttttttttttttaatggagattttatttcccttatttgagaatcttaagtgttgggtacatcaaaaccaatttctgggatgagggaaaaaaaacagaacccacaatagaaaaaaaagttattgtctgggtcacaacagaacccagagaatatattcttataattgaaaaattataggtgcttcataaattgaccttctgatacaaaatgacctattgaatttgcaacttggttcttggtgtggaggtccacagacaactaggcggtcttcagaccttagctggatgccacgagcggttatttggctttccactctttttttcttgtctaagaggcagcagcagcaacagtgcttctttacagtgttgatcggttcccttttaaagggctctcggaaaagtgtttttgactgtttttttgcctctcctctttcttaccttggagtctcactccatacattccagctgtgtcaccacctccagatgttttactcactgatgacctaagagctagatggttctctacatggtggttctggggagaggtactggcttgctctgttctgtgtgctaagctctcctgttcacagtagcatgttttattttgaaatagcaaaacttcctgattttttttttttttttttggtttttcgagacagggtttctctatatagtcttggctgtcctggaactcattttgtagaccaggctggcctcgaactcagaaatccgcctgtctctgcctcccaagtgctgggattaaaggcttgcgccaccacgcccggctctgattttttttttttttaaacagactatgtatagtacctaaatactgtttggatttttctagacctttgacaatgcttttgctattgattcttttgttttcttctcagctttttttgttttgttttattttgtttttgtttttttttcttgacctttggagctggggcttcagttagatttcagtgatcaaacttcggataaaaaggactaaaacagataaaaagaagaaaaaaaaaaagaaacaaacaaacaagtaggagtcactcagtaaaaagccaggccagcaccaaatcatgtctctggccattggcaagaactgatgctggcttaatgctatgcagagatgacaacagaggcagaagtagaactgacatgaggagccttttgtgaagcactgtagtcctcttttaatgacataaagttttaatgtcttgtggtcagagggaaggagcttttatgaggacgacacgtagcacagctgaaagcagcttgattcttctagagatcattacccacactgttctttccccgttacagacgaagtcctgtattcatgctgtgcgtttctgtataccattacttatgtgtacacgtgcagcctgataaaactacagtgtttgccacatgtgtaatttaaaattttctactgcccttctttcataaaatatggaggaaggagagatttgtaatgttttatttaacctagtgtatctgaaactatttttcgggaccagagagatggctttatgggtaagaggattggctgcttttccagaggacctaggttcaattcctataacccaggctataccacacctgcttctacactagacactactcatgtccatagtatatccgtagacataatgcagtcaaaacatctatacacacaaatataatttaaaaagtaaataaagataaaatatttttatgtgtcataaatatgaaagctcctaaggagttcttttgacacagcgtgggcactgaaatcagaatcctacagtacactagactccagactagccacactgcttatgcttattggtcacatataacactttatgagatgacaaaagacacataagggttatttcacttctctgtgacagagtaagaaataagagatggccaaatcagctagatctgcagctctttagcagttctggtgagtcttccaatcaaaccggtggaagaatgagacactcagtttctcctgcactctcctctgctgaaactgtggctagtattttagggttttccccaaattgtttagccagcttaaaataaaaagtgcattgtttctgaggatcctgttacatttgcttctgtataaaatgttgtgtgttcatttgaatccacatctacagttcttcatattttgtagctgatgtggtaaatcagtttcatatgctgttgggcaagctggaaggttaagcctcttaacttcggcagccagcatattctagttgctgtaaacaattaagcctgtcagcagttgaccttgggaatgctaatttgcttgtccctgggtgccgcctcaggccctggctttctctctgtgggtgggagttgtgaacctggtttggagaagaactagaggcatttgaggccagctccaaacagatgtgcttcttgcttcacttttgcatgtgaccacagttgcaagaggcatattcttgcatgttttttttaaggcctgtggaatcagagagcaaagttgaaaggcagcttctttacctttggatctgttcttgcccttcagtagagtcctcatctgtcatggcgaaggttgatttaaaaccagcagtctttttcattggggttcactgtgcgtcttaaacttacaagaagagttgaaagccaccttttatcacacacacacacacacactccttgctttgtgattttttactgacagggtcttaccatgtaacccaggctcgcctcaaagttactaccctcctacctcatcctccagaaggctgagattacaggaatccataagcacacctggtttcgtattcatggcagttattttgtgtctggtcaagaataaggcgaataattgaggagaagggggtgctagctgggaagttatactcactgagaagttcttcatgggctctctgtaagtgtgcatacctgagagaggaaggttgagagtatttattcaattctaaattaattactgccattgtaaactggtgacggcagcagtgaccactttaacctgaagatgaagatttcacttttcttctggactgcgtgttaggtttttgggagtgagaagagaatggtattcaagaaagagacgtattgagttcagttgtctttaggacagggtatttattaacagcacagcctgtcctgtggtcccaccctgatgccatagctttagtcctgccagacaaaggaaggtgcctatacttaaaggtttcagagagatgggggaaatcctatactgtgtggaaggaggcctcgttaatatgtgacttgagctagatgactcggaccacagtcagggtgttttagattgtgactagcattggggaagaggcagatttggctctgtgtgagggctgtgtaagggcaacaacttacagggctggctcattagctcttagctatagcatctgcacctggagactctgggttctgatatagtgcttaggcaaagtacaacatgatactgtacagtacagtacagtactgtagagtatcatataaaacttatttaaattgtttatttgaacttgtttggttttcattattaggtaattgttaattttttaaaaaattgattgatcaccaattacttcttggcccatgctttgaaaaggttaattagcagctacggcaaataagaataaatgcaaagattgggaaagctacgtggtagtaagcaaggtatttctaattagtagattattggtatgtgtgacagaaaaaagaatcagacctcttcctttacgacagaaccccggtctatatgtcaggatgcacacatctcttacaaaagatgtataggtgatctatgattaacaattatttgtatgcatgagtgagtatgaacatgggtaagtgcatgtgcagtgttccagaaagaacactggcccctctggagctctgtgaggtgattgtcagctgtgtaatgtgcgtgctgggaaccaaacttaggacctctgcaggagcagtgtgtgctcttacccacggagcaaccccctctctagactctgtatttatgcatctcagttatcaatagctatctcaatagattgtccatgtttgatcatttctttccccatgaccacagacagcacttggcacttcctctccaaataggccgtccatctgtgcaaaactgctgaccagcgcttacaggactgtggtgtcactggctacatccttccatatgcaccctagtcatagagacctcctcaaggggccctgtgtgtgctctgtggacttccttttcctctccctgaggtgtcctctcccttctgagtgctggtggtatgcctgttggtcacgctcggctgaggttcagtgccacatctttcttctttgcttcctctgtgtatgctgtacacttactcagccgagcagccgagcacttcttttctccgagttcttttctcgtgcccattcacagcactagacagacagggaggcttgaaaaggccacttagttatgttcagttttgcatgttttggcgttgtgttccaaagtatattttgtactagactcagctgaggagtacctgtaaacaacctacaaacagatgctggttggtcagcagtgaactgggcttggttgattcctgttctagatgaacatttttctgttatagtctcttctcatatctgtaacagattaaaattttgtagactgaaaatataaaatagttttggagagaatagcagaaatgttcctatggaccagcagaatggctggatgcactggccatgaagccggacacctgagtttatctctggaaaccccattgtggaaggagggaactggttccaacaagttgtcctctgacatccacatgtgcaatcctccctccaccccccacagttgtttttacaaagaaatgatttttccatgttcatatgtatgatttactggtcggttaatttctagtagaaattattttttacaaagagcattatagctgctgccatgccatagattactgacaaatcttacttttgaagttaatttagattcaggtatatttatactgaagcttatgtgtgttaatgctttattttgcaaaaacctgctacatgtctgtagtttcactcttatttgtttactctctatctggcaagggctattctagtaatataaagtaattccactgcttttagaccttattccagacttattctctcttaacagtttgatgaaaataacctgacattgatggaagagatagctaaagtcagaggggtaaagtggcttgcctgaagccacagagtacgttcatattccattagcttctgttgtgctgaattgaatgtatgtataacaaattcacacacatgtatgtgtgtatatatcagcttgctctttattaatcctaattgcctttgtataaacagttaagttagtaaataataaatttataaatatggtatgtagattcttttttgaagaaattttatgggcagagtgtttgtttaaaatttgttttaatggaattttccataagcttaattgtcttaattagggttttattgctgtgaagagacaccggaccatggcaactcttatgaaggaagacatttagttgggactggcttccagttttagaagcttagtccattactgtcatggcaggaaaaatggcagtgtgcagcggacatggtgctggagaaagagttgagagttctacatccagatttgcaagcagcaggaagtgtattgatctattagacctagcttgagcctctaagacctcagccccacccccagcaacacaacttcttcaagaccacacctacttcaaggccacacctcctaataatgccactccctataggccatgcattcaaacacatgcatgtatggggccattctttattattatttttttattagatattttctttatttacatttcaaatgttatcccctttcctaatttcctctccaaaaatcccctttcctctcccctgttcccctgctccccaacccacccactcctgcttcctggcataggcattcccctatactggggcatagaaccttcacaggaccaagggcctcttcttccattgatgaccgactaggccatcctctgctacatatgcagttagagccatgagtctctctgtgtgttttctttggttggtggtttagtcccagggagttctggggttactggttagttcatattgttgttcctccaagggggctgcaaacccctacagctcctttagtactttctctagatccttcattggggaccctgtgctccatctaatggataactgtgtgcatccacttctatattagtcaggcatggcagagtctctcaggagacagctatatcaggagacagcttcttgctattataaataaggctgcattgaacatagtggagcatgtgtctttattacaagttggggcatcttctgggtatatacccaggagtggtatctctggatcttctggtagaactatgtccaattttctaaggaaccaccaaactgatttccagagtggttgtaccagcttgcaatcccagctcgccagcatctgctgtcaactgagtttttgatcttagccattctgactggtataaggtggaatctcagggttgttttgatttgcatttccctgatgattaaggatgttgaacatttttttaggtgcttcctagccattcagtattcctcagttgagaattctttgtttagctctgtaccccatttttaataagggttatttggttttctggagtccaacttcttgggttctttatatatattggatattagccccctatgtgaattaggactggtaaagatcttttcgtatggggccattcctactcaaaccaccatatcagtctatttttcctttagtctttcctccagccatctaacagtccattagccttttcgtttttgtaatttgtccattttattatctacccatgtaaaatgtataatgtagtggggtttttaaaattatattcatggatacacataaccgttaccacaatcatttcaaaaccacaacccctggcaaggtgtgatattatatacttataatttcattactcaagagactgaggcaggagtattgtgagttcaaggacagcctgggctgtatagtgatgagaggagaggagaccaacaagaaaggaagtgaggaagggaaaagaaaggaagcagaccctgcgtcctttagcattgcacgccagtctctccaggagccactgatctactatggctctatagctgtggagttacctgtttcagacatttcatatagaagtgaattttatataaaatgtggttttttgtggttggagtgttcttgttttcaagcaaggttcatctgtgttgttagatccatcagcatttaatcagttagcacttcatttatttttatagtttaataatactccattatgtagtatgtagctataccacattttgtagatctaccagttggtggaccctgggttgttaatattactaaattattcttggatgcttgtgctttgaacgaggaatgccctcactaggctcaggtatttgcattacttggtccccagtaggtggtgctgtttggagaggtttaggaggtgcagtcttgctggaggatggatgtctcagggcttccagattttatagcctatccctgcttccagtttgctttctctacttctctcttgcaatgtgagctctcaccttcttggcaccatgcttgcaggtggctccctgatgtcatgcctcccagccgagatggattcaaatcctctgggaccagagcccagataagcttttggtcacatggtgctgtgtgtagcacagcagcaaatgtaactattaattgtgctgctcagcatccattctcacgttagtatctcagcatggtttcagttggcatttatgtaatgatgtcatatgcttttgggctcttagagaaatctctggagaagtgcctattcatatcctgtgcacttttaaatccagtgtctaagttctttatatattctagagaaaagtctgatataagacatgatctgctggtatttttcctattgtgtgctgcattttactttcttgatagtgttcattgaagtatgcaaggttgtgatcttgcgggagtccagctgtgtggatttgctgttttcgtggtatgccttcccctgatagagcttagcatcaagcttgaagcagtcctattcatgtgtgctgagtatgagttttgagctgggactcatttgatgactagttctctaaaggtgctgtgatgaaaaccttttcccagcaaccatgtggaaccctggagttggtgggaattgtagatgagagagccttcaggacaggcttcacatgggctgttgcaggttaaaggtgagtagctgtttcatgtactagaaacagactggaaaagattgatgagtatttgtcctgatatgaaagctgacaaacctgcctgtaagcttcatggctgcttgagaggtaggaaacccctaagtcaaagacagcagcttttgttgttatacctcagatagtatgcctgttctggtttaccttcctgtctccatgcctcatggtttctggagctgatatgggagagcccaggagggttgaggtcacaactaaggaacctcaggctcaggggtccagtttttggaagtagacgccatcttagtcttgtgagatcttgctcttacataagcatccttgtaaagatggactgggacagaagggcacatggcacctttgctcccaagatgttcagaatgagtgagaaatgacttgctccctagaacctgacacattcagggagctgcaagtgcttcagggtgaagattaacttcagctgaggcctttccaggctgttgccaccaccagtggtgaaagcttcagcacttttctttggagatgaactttgtccaagatgcaggagaggccaggtgagatgaagagaggggtcctcctctgtccccagagggaacataatcctttggttgtctggatggggtaatgttgggctttcagaactacagaatcatgcactggctgcccactttagtatcattgtgactttaactttcaggttattttcctttataagtagtgatgatgtaaaatagcagtgaatgtcttgtagggtccttaaccatccacccatccacatctccctaacacctgccgtatttggagttgctgtaaagtattaaggaatgtatctaaaatgctctttacagagctggtacataatattcatattggtcagttgctttgtttttgctgtaattatttgagcatttgaaaagatggatcctgtagagccttagggtcagaattgactttgtacaaaaatacatccgtgaattaaaatgcaaattctctattagcctagatgattgcttcatctcttagagcttgctttttcctgcatgtgaagacttgaagtgactgcctttttgtggttattctgggtttgagacagttatttcctttgttgtttagggtttactttgaactatggtcttgctgtgttgcccaggttagcctccaaagctacgtaggctcaagtgatcttctttctcagctacctggctggagtacagacacatgctactctgctgtattaagctcctcactttaaaggcggccctgggcagagactggctacatgtgtgtgtgtttcattggtattctgctgagtacttagttttaagtcactgggtgctctctaaccagtgtcttatttacatgcaaacaaaattacactaaataacagattttttttttgcagtctcttttgtcccattttgcagactgttcttttagaaagtatcctttttaaattttggaataataatagacttacaaacacttggaatgagagttcccaaatgtctctacccactgcccttacttgctcagaccttagtgcatagtacatttatcaaagctacataaaacattggtgtgttattgcagactaaacttctgttttagtaacattttttcagtggccctttttcttttttttatatttattttatttgtatgagtacactgcagctgtcttcagacacaccagaagagggcatcagattccattacagatggttgtgagccaccatgtggttgctggaatttgaactcaggacctctggaagagccgttggtgctcttaacctctgagccatctctccagccccagtgtcccttttcaatacattgtccaggatgcagtcctggctgccacattgcatttagtcacttcttgagttgtataacctttttcttttcccttaaaaaaaaaaagtttgactttgtgtgaaatgtccctcagttggagtttaatgtttttcttatgagttaagggcaattttatgtttttagaagaagatgacagaagccaaactcctaatcacattccgtgagggactcagcatgctaccctacaccacttggctctggcagtgtttgctaggtgtctttactacatacatgagtagtgtttttgtttagttggaattctttaaattgtttttttctaagaccttggaacacacagctttaaacaagatgtcttcatcaaatccttcccctcagagctcaggaaatcctgccaaagaggagactgaaggagtgggggagacagtacacaggataccaggagaacaaggccctttaaaacaactgagcaaggctcataggaactctgagagactgaagcagcagtcacagcgcctacatgggtctgcaccaagttctctgcgttatatatataatagctttcagttgagggcttttatgggaggcctgagtgtgtaaaagaataggccttcttgtgccttctcttgaggctctttaatttttttgttggcttgccttatccgacaagtaaatcaagttggtgtttgttttttcttattatattttattttgctatgttttgttatcnnnnnnnnnnnnnnnnnnnnttccccccctccagcactgcccccccctcccgcacgcccccctccaccccccagtaagagacagaaaggaagtggatctatatggggaaggaggtggggaggaactgggaagagtagaggaaggggaaacaatgttcagattatgttgtatgatacaatctatgtttaataaaagggggtgtgggtattgtcttctttatactctgggcacattatcaacgacatctccaaagagtcctagttctcctaattggaaattgacattttgaaaataagatctgggccctgggtttgcttctaccaaaacatcacttttcagcaaagttggtaagtgcatgctagtaggctgacatcctgtcttcatcaacctgtcatcctgcaggtagccatctggatctgacctcttcaactgtaggattgtatggctaaattctagtattctctggatagtctctcatatcactctcctaatagtaaaaaacatggctcccaccatcccccatccatttatttgtttagctccactataataaactaaatcagttttagagtcattaacgtctgtgacagcaacttgaacttgctcacagggtttgcatgattctttttgcttttagtcttacagtctcaaacaccattgtctgtggttatgtaggtcagttcttttcctttcaggcgggcttgtcatatggttttatgatttttgtatctttgttttctttctggtttggcagtgctggtgatcaaaccctgggtctctcccacattaggcaagtactgagctatccttggcctcagacatttataagatgatttaaagcttttgccatagtcaagtctctccaaggagcttctcagtcctgattgttgccatcctgttgttcttcatgctttataggcactgtgatggctagtcttagtcgtcaacttaactacatccggaattaattaaaactcagggccaggcacacctgtgagggatatttttaagtgactagaagctcaaggacacaccagtggatcttgaaggttgaaggactcacctttaatcgagatcttttgagaggggaaaatatatttttaatctgagccacacctgctggcagcctatataaaggacacgcagaaggaaacttgctttctgtctgctggcttttgcccttcctagcacatccactccttcactggcattggagcctgcttctttgggattcccatgtatactgaagaccagctgacatatcaatgttgtggaccaaacaactgctgggttttttgactttctgttggggaaagctattttcaaacaatttggaccatagcctgtaaggcattgtaataaatcacatacacacactcaacaccacacacacatacacacacacacacacacacacacacacacacacactctcattcactctataagatctgttcctctatagaactctgactcaaaaattaactgaagttcttcatgggtgaaatctctctgtgtttggacagattgtagtctctttttgatagtacatatactaaagtcctgctgttttccagtagcagggtcatgggtataaagctgaggctaggcctgctaatgaggctatagtcaccttcccaggtcagcgatgagcataaagaactttctgttttttagagatcagggttagcccttatgttaggtaggaacctttagaaatggatggataagaggtgtgcaggcttctccaacacaaggtaaaagagctatgccattgtgttgggatgtgattctgacaagtggaatggctctagtgctgaaagctagaatccagacataagggctgcgtaagataagtatggtgcttggccaacatggccaacactgtggaagttacagtgaactctcaagtgagaagaacaaagacttagagggttttttaagttgttcttcttcttatttatttacattccaaatgttgcctccctttttggttccccccccccccacgagttcttcaccctaccccctcctctttgcttctgagagggtattcccctacccacccacccattcccacctcaacccactagcatcccctttccctagggcattaagtttctataggattaagtgcatcctttcccactgaggccagacaaggtacatatgtacgaaggaccacgaacaagcccatgtatgctctatggttggtgacttagtttcttggagctcccaggggtctgggttagttgaccttcctttgaggaagttgttcttcctatgaggttgcaatccccttcagttccttcagtccttcccctagctcttccataggagtccttgaccccagtctaatgattggctgtaagtatctgcatcaacctcagtcagctgccagtagaacctctcagaggacagccatgataggttcctgtctgcaagcacatcttggcatcagcaatagtgttggtgtttggtgcctgcacatgggatggatcccaagttagggcagtctctggaaggcctttcactcattctctgctccatttttgcccctgcatttcctttagacagaaatagttctgggtcaaaatttttgaagatgggtgggtggccccatgcctcaaatagggaccatgtctgtctactagagatggtctctttaggtttcatctccccactgttgggcattttggctaaggtcatccccattgggtgttgggagcctctcacattcctgatgtctgggacttcttaggggttccccacaccctatactgttgcatatttctatacattctcctggccctctgggcttctctcctgtctccccccccccacccccgacctccattcctgatcctgctaccccttttccctccccttctcctctcccatccagatccctccctccctctgctttccatgattatgttgttcccctttctaagagggattgagggatccacacttgggccttccttcttgttatggttcctatggtcagtgagttgtgtcatgggtagtctgaactttttggctaatatccacttatcagtgagtacataccgtgtgtgtccttttaggtctgggttatctcactcaggatgatattttctagttctattcatttgcctgcaaaatttatgatgtccttgtttttaatagctgagtaatattccgttatgtaaatgaaccacattttcggtatccattcttcggttgagggacatctgggttgtttccagcttctcactattacaaatgaggctgctatgaacatagtagagcatgtgtccctgtggtatggtagggcatcttttgggggatatgcccaggagtggtatagctgggtcttaaggtaaagctatttccaattttctgaggaaattccagattgatttccagagtggctgtaccagtttgcaatcccaccagcaatggaggagtgttcctctttcttcatatccttgccagtatgtgttgtcgcttgagtttttgatcttacccattctgtttggtgtaaggtagaacctcaaggttgttttgatttgcatttccctgatgactaaggatgttgaacattcttgaggggagagattctctttgaaattgctatagaacaatgcctctgactgtggctttagcagcacttgggatatttattttaaatagagctccgtaatgtgtttgaaacaagcatcctaagtaactctgacatttaagaaccctatcccctgactttgggtatgtaactggccaaaagtagtttactaaattgaattgcagatcacttctggtaatagtctggttaaaagatcaatactgtcctttggtaatattagtaagctagctgatgcttgctgtttagtctattctgggttctgtgctaaatgcttttttcctttttcattttaaagattatttattttatgtatatgagtacactgtagctgtacagatggttgtgagccttcatgtggttgttgggaattgagtttttaggccctctgctcgctctggtgggccctgctcactctggctcaaagatttatttattattaaaagtagttgtcttcagacacaccagaagagggcatcagatctcattatgagtggttgtgaagccaccatgtggttgctgggatttgaactcaggacattcggaagagcagtcagtgctcttacctgctgagccatctcaccaacccttaaattataattcaataatttataattgaattataattcacttttttttaaacttatttattttatgtatgtgagtacactgtcactgtcttcaggcacaccagaagagggcgtcagattccattacagatggttgtgagccaccatgtggttgctgggaattgaactctggatctttggaagaacagtcaatgctcttaaccagtgagctatctctctagttctaatttttaaaatttaaagtatagataaatacttaaggaaaacaattttataatagctcttcaatgtagaagtgcaacagttatagaacatcagagtaggattgcagctttttcagtacctcagcttgaaatggactttttaggccatttatttcaattccttcttttttttttttttttttttggtttttcgagacagggtttctctgtatagcttggctgtcctggaactcactctgtagaccaggctgatctcgaactcagaaatccgcctgcctctgcctcccgagtgctgggattaaaggtgtgtaccaccacacccggcttcaattccttctttttaaatgaggggactgagccccagaaagagtcagtgtttaacccacagtctcagcgcacatcaccgacaggcccagatgtcctgatttagcctcctgtgtttcctcattctctttgtttttatactatctttatgaaaagcttcagaaattaactagatttttttaatgtatccatttgtgggaggctaattaaaagcctcacagatgttcactggaaagtgacaatttgtagctaaaactagaagcaaatctagagactttagaagaatgctgggtgcagtttcaaaaatagatatgagtgaatggctagggtatttaggagcaaagcttattttaaaacaaacacttttgtagaatgcattatttatgggtttttacacccaattttagttttctagtttaataaaggcctaaaataatttaggagcacaaaaatagagaagccgctgattgagttctaggtttgttgaaaacaatggttttcttttcttttttgtctgagattctattaagaaaagaatctcagacaaaaggcagtgtgactccaactctaaatcccatattagaacaatggccctcacatcttcctctgccttaggacagactgccaataggacttgtccatatctgtcctcaactgtaccccaggcttgccgtcagtctctggtctaggactgtgattgttgtttctaacaatttcataggcagaaatcataggtaggagctcctgtgctgctggtcctcagagccactgaattacagaaggtggggctggaaagcagccgtgcaccagcgagctgacacgaggctcttaactgctggcttttgtttatatccttatttcattgtttgctttttttttggcgggaggtagtgatgatatttgttttattaacaaatcattatttgttaataataaatatattgataatatagatttatacttactatatattaataatataaattattattcattaaaagagaatgtttccccattttacataaaattgccatgatgagtgtcagccatatacactctaattctaccacagagtaggccaaggctggaggatcctgagagtgaggacagtttattgtacttattaagactttcaaaatccagtagaaagcttgtcagaaacatactgaggacactgagacagtgtcctctaaagtctgggagtcattgtgataaggataaattatattaaatgtgcttttttaataggatcattgcctaggagttagtgatggcattgtggaagagagtagagctgtaattcttgctccctctgcaaagccgggtccaagcagacctcagaggactagccacctcagtggctactgagcggtggcttgctcttctgtttttgacatatttgtctagtttttaataaaactggagatcttttcatgtgcttcattgacattcatctctggtggtgttgctattgtgttttgtccctatttgttattggactgtcttttttctttattgcactctaaagatattgtatattctgagtatagattcttcaacagatatataatttctggagaagattcttccagtctatattctcaacaggttattttaaagacatgcaattttattttgatgacatgcagtttaccaatttgttctcatatgaatggtgaacatatctgaatctaaaggtttttcctctatgtgttttttctgaaagttttatgttttgcactttgtgtaaggtgtgcatctgtttcatttttcccctttctgtcctctgtactcctcttttcttctttgccctttgcccccctttctccccactcctctttctgcttctcttttccttttagtagcccatggttccagcaccacttgcagaagtttccctctggtgacttggctttgtacctctgttaggtcagttgtctatgtatgtgtgtctctgcttctggactctcttctgttggtgcttctgccaatactgattatcctgataccgtacctccttattgtagctttatattatacctccatcaggtagtactggagctgcagtgggtcctttgcataccctgaggattttataatccacactttatacaaaagtcagttgagactttggttggtttcctattcctgcagcctgaaagcttcctcaagagactaaggtctactggcgttcatcaaaggcttctagccaccctcttccctttctctttgcacacgatcagtgtcttaaacaccttcacaacttttttttgtactttttttttttttaatttagttgcttcagaccagagaataacctgctcacccattggtaaaaagtaagagtattgtagcagatttttgataaacatcaaagaaagagaattgattagttggaaaaaggattagagagaaaagatattggcaaagtagatcacgccggaagaataacagtaactggaaaaaacaatcaagacagaagcagcttcagttagagatgggagtagcagccgcagtgatcaagatttaagtcttgaaattgctcttctctctttttctaccttctctcctttctccctgcctttctacaataaaggtctaaaaccagagagagagagagagagagagagagagagagagagagagagagagagagagagagagagagagagatcgttcttgttctgtttggtgctgtagctgggtgcttgtgtgtgggctgtgatatactacattctctcattttataaatactgctcagtgttataattggtaccttggaggtcagaatcacttgcttagtaaatattaataattctttagttcttattttagatttgattataattgtttccccaaactagacaccatagtaggtgatcatattattataggaatgtgtttcacttaacagcaaattccctgacaagtttttagtagacttaagtgtctatattcattatttctttgatacaaggtttttaaagaagggaagacaaacagtcctggataactgatttagggctgatttattgctgatttgcggctattacattggaaacaaattattgtgcctgtagtagtcccatggcccacatagagcaagaatataatcactgtatatgttggcttgaggtgtaaatcattcaatgtgtagcgagttcagatttattgttatctttgcctggtgctaacctagactcttctgggagggttccaataatcagagtagctaagctgtggagcagactttctcatcacgccgagaatcagacagagtcctagtggttgtgtcagtgctcttgaggacattctgaatggggtaaaaatttgtcaatgctctttgtaagacgatacagcactgccctgctgatcgctcttcaggatacagcagaggctaggcatggagtcagtgcttggtaataatcactgttggatgactgagtggaaacttcattaccactgaacttgcttagctcaattactaaactcgtgttcctgcctaaagctattcttgcttttctgtggaacttggttttgtttgcttttatgttggtactgtagagtagctatcctggagttaaaagaggcatgttctcagtctccgtgttcctgcacgtgaagactaggccgctaaagaacactgggatttcactgggagacatggaagtcatttttcctaacacatcatactttgagtccttgtttccattctgtcttttactattttgatgtgtctgtagtcatctttagaaggtggcatgaaatacacagaatagctctataagattacagtcaggaacccaatagcagtgttgactctaggcagagagctttgagggctgtagacaccacagtagtgtatcatctcagttttcagccatatgctttattaatcttaaacattgcttttaaatatgtgggtaaaccacatgattcagcatttactagcttaagtgagataaatttatattgagaatattagaaagtatgactaatagagaaaaatagccttcagttttcccaggtcttccgtgtttgaggtatcgggttggatgattcaccagtatcctctttaagtttctcaggaaccattgtaggctttttcagaagagattccttttcgtctttcttgccagaaattcatgcaggagctttagtgttggaccagaatcaaagccaaaccctgttccttaaacctccttcctgggtctgcaagtctcacagtatagataaggctaggcgcagacagaagcattgttagttgggaagtgctgctgtgaatattgcttccagccttgaactcacaatttttttttccagtctagtaggaagaaattgatggttgggatatggggaatgtgtttgagtcaaatcaaagacctgactctcaaaactcgagggaaccaagagagtctaagggtgtgttttaagatgagaagagcctatggtgctttagtaactggcagcattcatttctgtgatttttgtgacacctttgccatggtagtttatggagtgccagcagatgtctcacaaaggtagctgtctgtagagtgaagggacgccaagtccgagggggagcacagtgactagtctctttcccctgtgtcctttcctcttacgggaaagcaaggcaacaaaagcccttagaaaaggaacaacacactcattactgcatggcttctgtatcagtgtgtttgtctatgtctgtggtagttcatacactgtgctttgtgcctggtgctgacttcaagtcataactctacgtttattaactccatgacctgcccgatgatttcacctctccgggagttaatttccttatctttattgtatgcttaatagtgcccaaattatgttggagcagaggtagtgtgttcacaggtcctcgtacttagtactcattcaaggttgttcattttttccatccatggctttctttgttcatcatcaatgttttcctttgactaggacaactctgaatcagtcagtttcaggggagccctgaaagcatttgtttagcctccaccccagtgtggtgaacagccatggccttctgctaaggttctttgcctcgtgtggtagtggtggctgctgttcttgcattaaggcatctcccccgcctgatgtgtagtaagtgctcagtaaccattggcaggtaaaggagtttctgaacttggaaaggggtgtctgcaacccttctcactgaggtctgaattctgtgggttcggctggttgctttgtaagttaatatatacctgaaactttttagttctgagggcaagatgattttaggatttggactagttatatttgcagatgaactatctactctgtaatggatttagttaaaaatatagctggttagtgcttatgccaagccaggctcttctttgagcactgtacctacatgctaacaactttatgaatttggtactattctttatctttttcttgttttaaaaggtttgcattttatttttatgggtatgagtatttgcctgcataaatgagtgtacactacatgcattcctggtgctgatggaggcctacgagggtatcagatctccttgatcaggcgttataggctttcctgagttgtcatatgggtggtaggaatcgaaccttggtcccctgcaagaatcacaagtgttcttaaccactcagccacctctccagccttcagtactattctgatacccattatagaggtgtggaaacagtctttccaaagactacacagtccacaagaaagaaatcaagcagactgccccttcaattatgtggtgtgcagcttcccacgtctgggttattatgtgatgggagggctgtggggaggcagatggcaggaaggtggaaagtcctccaggatttctcctggactttgggaagaaaccagctgctgactggttatatcatacacctgatactgcacacttacttctagtgggaggcagttataacatgggcattcagttttaattttaccacactaatatctgtgtggaggaataattacaactttgaagttcagtgtagtgagaagtaaccaagtttctattaaacattgctcaagcactgagtaagtcattaaattcaactcctgatgagtgtagattgcttaatatctgtctgtcaggagacacacagatagacagatagatgtcactagatgtaggtaattggatctgagtttacagagaattcaggttttggtttgattttgacacagaagttgagaatattgtttatactgtcatctgtttgtatttctcaaaaaaaaaggtaaatgtcttttacagaaaatatggaagaatcaagttctcatataaagagatctggaaataacttattcccagtctttagaaaataaacttttctggctgtgtgtgccatttagtctaaggaatttaaactaaagtcaggcaacccttgccaccatccttcttcttcgccaaaatggtctgtgtatttaatgacatttcgtgtttatcagattcttctaagtgtgtgagtcatgttgactcacagtcagcaatccttagcaacactaaatgtctgctttgtcttagcttggtaagtcactaataaaatacatgctgctgaatttaatcaactccatgtaattggttgtttctgttcagacatgcttgtgtgtggctttgtagaatagaaaaattaacctgatcccacagttttcttgttgtttgtttagaacaaaactttagaaagcagcttgaccctggacaaagccgtgcagctgattagatatgcaggtgggaagaataagtaggtgacatttgtcttgagggtgtgtctctctagtgtgtgtgtgcacacatgtcctacttgtaaaagtaaagagattttatgggttgataagagctggaatactaggtcctcttctggacagtagagagatgttagagaggggaccttatatctgagatcatagggagctttcaacaagggcacctcagaaatccatgtgaggtgtagtgaagttcaaggtctttgtatgtggtttgcttggagagacaaggagggcaaagcctacattttgatgttttagtgaaggctgggctagtaaaggcctagagactgtgagtgactttcagctctatttcccaacccccagagctggacctcagggaagtttattccatgggctgcaggcacagcacccctgtggttagggaaggccctgtttagaataagtaggtccagaagtgtacctcttaccccccctccctcactgacctggttgccggtctggaatggcagttgggttgctctgttgatcatgaccaggtggacaaggatatgccatgataagaactgcttcccccacctgcttctgcttttcaaccagtggcttagaaaatactgaacaaacaggcatgagtcaaccctggatagtactgcatctgaatggggaaaataaatatctcatgctcccatactgcgctacataaagacagcatattgccatgcttgtcacctagttcttagccacaagttggaagttattcctccttaagagtccatgtccataaaagcagcttacttgcctcctgccctcctttctcagaccagtctctacttttgccacgctcttctacaccgggacaactggcatcagtggctatggtttcgccttcaacattcatatttgttcccgcctcagcccattatcttcctctcattaaagcctataaattttgtttgaagttgggtttgattctagcactaagtcacccatttctgcttaatataccttcaatgctctttcagtgcttcaaagcagggaatagtaagagttattgctgttggtgcattttagcattgagtaacagatgacgtgtctaatgaatagcgtggctgctgagattgcataattataggtttgtctgcctttaggaaaaccataagcaggccagcttcatccagttagagacttctccaattatgtaagcatgagagtatttcattctaaaatgaagccttcttccagtgattctgttattctttgtcttggggtgggggttgttttgttttattttgtttttttgggagtttgcccctgagtaggaaaaacaaaaacaaacagaaactgtcctcaagggatgagttgttttgtggctctttctggactaagccacacttaataatgtacatgaggtcgtgcaggctacagtggttctgcatagtgttagaaataggtctgattggcattgttgggtaggtttgtagaacagcctaatgctggcatgcttacagacagctagaattttatagtgcaaagcagggattatctgtgccctctggacttggtttgctggggtggaggtagggggacatatttcagctagttgtactaactttaacttcttggaacaatttcttaattaatgtgccaggtgacaggtttcccagaggccttgagttgctcccgtgggtcttctccatgtgtgcattggcttggaaatcaatattcattaagttcatgtagattcattcagttactgagagaaagggttggatctaatacatttgtaggatgacatattgaaggaatttcaatattcccacttctctcagaccttgtttacctgggggagagcaattagatatatgtaataaaagttatttctgatcatgagtgctgcttaggtttttttgtaggactcttgttccccaccatttctctatagttctctttgtgacctgacaggaagtttgtagtagtttctgtctgtgtgcttggttgctagtgtttagactcgtgtacccttgatttttcagcatctggacttggctgatgttctcctagcattcagtcggtgacgtgactgttgtcatagcactttaaactacatgtgaggatgggaaaagatgctttctctgtgttaaaacttagtgtatgtctaacctgggggaagcatttattttcttactcatttcttctatttgagaaatttagacagagcctttcagagtaggtcccctaagcctccaagtcaaattcccagtagcctacttagaagtatagttctaagggtctaaactggaagctcagctgacgctcacagattgccttaaatccttgtgaaggagttggagtcttgatcataatctgttttgtccaacagagtagcatctttgttttgccattagaaagtcagagtttggaagtttcattcttctgcttggtaccattgttgcttagaacacggtagttgagctttcttctgtatataaagcagtaaaatcttcccatctctggttggtctgtggtatgagcctgtaataccagctatgttggaagccaaggcaagaagagcccgagttcaagacccatttgaactacatagtgaattcaagaccagtcagggaaatttaagggggctggggatgtagctcagtgataaaattcttgcctagtatgtgtaaagccctggatttaatccctagtattgaaaaaacaaagtaaccaaccaccggtctcacttagccagatatggtgctgtaagttgtaccataaatacaatctgctgtgcatggtgctggtgcctaatgaagcatgcactaccgttgctgctgttggtatcacggtgcgtgtatgttctgtttcctcatggccattacttcctgttctttgtcatctacaccaacctctctaatgctggtcctgaggggagggttttagcatctttatgtgactctgcctcctaccctacccagcattggtagctcttttttttttttttttttttctgatgaaaaaaaaaaaaacacagtgaaaatagagtagacaaatgagtatataccatatgctttcttgattttaattcaccagaatatcatgtaggacactcccagattagaaaataatgatcctaggaaacattaattctgcaactcgttgttggctctcagagcactaacacaccgttcttgtccacgaagcagtgagaaagacggggtaagaaaggcatgagtatttatggtgccaaaatacgaaatgaaggtgctaagataaattaagcaaatcgtttcttctaggttggtatactttccgaacagatgggatttgagctcagttcttgaaggatgttcagatttagtctggtaaatcgtagagagggttttgtgaaactgtgtgtgtgtgtgtgtgtgtgtgtgtgtgtgtgtgtgtgtgtgtgtcagatgccacggcctaggaaagccattggaatttgtctcattctcgaagaacagcggtgaggaaagaagagcaggatgtcacatgaaagaggcaaatgcccagaaattgctctcagacgcctggaaagctctgggaagggagggacagacaaatagacaaagttgatgttgaagggcttttgaagaaaagtacagtactttacaagttagcctttggatgatagtgtttgaactttttccagatgtggcatctgaagtagaagacaataatggtggtttctttttctctttcagctgaagtgagtagtgagtacagtatggacaaggccatggttgagtttgctaaaatggatcgagaactaagccattatgttaaggctgtgcagtctacaatcaatcatgtaagtttactccacttcccttccagtgcgctcacagctcagtcatctagaaatggaagcacagtctaaattcttttctacccttaatgtctccttgtccttactgaagcagatgttgatcagcactctcatggagcaaagaatctgaggtattttcccagctaggcacctaggctaattagcatatgaaaagacttttagattggcttgcatttttatgtgaagagttttagtttaagctccctcaaatgaggagattttcattaaactgttaagagtgtgtacagtgtgtttctgttgtcatttgactaagcagataactcagaccaggtttacttactcattctctagctttaactaatatgcatctcttgcaaaatttttagaatcagataatttggaagcatttatagtaactttaaaaataaagttggcatttcagttgtttcagaaggcagacttacctctgttgactccagctgtcacaggaacaacacataaggcagttaaggtgggaaggcagcaacatcctctttagtagtgccatgttgagtaagaagtgagcaataagattgcagtaatggttctgagaaaccctttgtctctggaaactccctgccgaagtgactttggatacctgtggaacagggtgccttgcacttctggtttctttatttgttttttattcttatggctgtgggaaaattccaaaatgccactattcagatgaagataaaattttatgttgtctaatacttaagccactactatgagcattaaatatagatatttttcctgcttttcaatgcctagtcttttgtgtaatgtaactgtaattaagaatagttgtttatagctaaataataaactcactcaaattataaaattccagtggtttttggctattgtgacttatggttctagttttttgaataatttttgatgtgaaaatacaatttggccgggagtggtggcacacacctttgttctcagcacttgggaggcagaagcaggctgatttctgagtttgaggccagcttggtctacagagtgagttccaggaacagccagagatacacagagaaaccctgtctcgaaacaaaacaaaacaaaacaaaacaacaacaacaacaacaaaaaggaaaatacattttggtggcatcaaatttgaaaatgggtaataaagtagtaggcccccagttgccctcacacttttgagtttcttctgatctttggccaacactttactgcatgcagagtggatggatttagagattctgatgcttgttacagtgttcctgggctttcatgaaagagaaaactgtctttctcttttgaggtaccaaattacactgtgattgcaagtgtcacgcaagaccacagtagtcacaacctgtaaaggcttttgagacatgcagtcgggaactcagagggcaggactgaaatttgaggggaaagttttgacatgactttctggacttgaagatatggcattactgcattgttgcttgtgctgaggtataaagaatgagtagcagttggggagggaccgaggctgccagcgctgtagaaattgcagcagtctggggttggaaatggcatagttctcccacttcctcaggtaccatccttggtcacaaaaagttactcttggaaccttatgttcttggtttcatcataaaggcattgatctgccagtttcaccactgttaagtgaaccagattagataacctgtatcaaaacagttgggcatccatagctcttgacggagctgtcaaatactgtgttgttgcaaacccagattcctaaacagaacttggaaagatgggacacacactttctagaacaccagtacgttgttctgtttactgcagtttgggatactttccatgaccttggcttactctaaaatttatgtcatgcaggattagctttaagctcattgaggtaatatgtaaagtgttcatgatctaaaatggagttgtaagtcaggttggatgatgggaaactctgggttctgtcatagacttctgaagacatagtactctcacttaggagcttgtgccaaatgctaccatgacctttctgattatgaacttttatataataaggcacagatagtttttttaaaaagatgttacttcagtcattgaagtacttatcatttgaacagacagctctcttttctactcccctcttagaatttgaagttcatgtttgggaggtttactctgcgtttagatacctggattagtttaccagtaattccttgggaagtccctttaacagttcacagaagctcttagattgccacccattgtcttgtgagaagttggtactactgtctcccataggtctgaaagtttaattaggagtcagtattcattacctaacgggaaaaaggatcctggttttagcaagtttgcttgtaggtggaatattaatatagtgtgtgctacaaaatgaccaattcccaaaacatttctgaagactttcagaatgcgtgagtttaatgcctgtgagctatttggatggagacttttcagtcatgagagcacacgtgttataaaagtgttgtggaaggaatgagggtacactgataatgatacctgtcatcatcactgtttactgcctttgaaaaacctgttttcatcttctgtggagagatttaaatggctctgcctgccgtaccttcccttgctttctgagaactccattagatggctttccctccacatgtctgttgatttttttttttttttttaatgtataacatacctatgtgccaggcctttgtctttctagggcataaaaagtcagtgagcaagacctacatgactttacctatgatttctgaagtctagaacagaacaaagacatttagtgagctgtagttgttattttattactgtcactgtgggccatttaatcactctaagcatagttttggtggctggttagaagactccttcctgaagagatattactgataagagtaaaatgagtcttttttttttaagatttatttattattatatctaagaacactgtagctgtcttcagacactcgagaagagagagtcagatctcattatggatggttgtgagccaccatgtggttgctgggatttgaactcaggacctttgaaagagcagttggtgctcttaaccactgagccatctctccagcgctaaaatgagtcttaatatggagaatgcaaggtagtttatttctttttttttttttttgttttgtttttgtttttgtttcgagacagggtttctctctgtagccctggctgtcctggaactttgtagaccagtctggcctcgaactcagaagtccacctgtttctgcctcccaagtgcagggactaaaggcatgcgccaccactgcctggcgatagtttatttcttaatgtgacttttgtcagaaatgaaggcaccttatttatgatggtctttaattttctttttaatttaattgagacagtctaatgtagaccaggacatttgaacttgcagtgtgtgagattacaaatgtgtactactgtgcccagttttatgggatggtggggattgaacccaggactttttcatgcatgctagtcaagcactctagtaattgagctacattcccagcccccatttctgatggtctgtatttatttatttaacctatcattatttgttttatttcctccatgattttattcaatttacatcatgatcactgccccctctctttggtttccccctcacacagtccctgcccctccccgtgcccctatcctcttctatgagagggtgaaggcccctctgggtaaccccgcaccctggcatatcaagtctctgcagggctaggtacatcttctcacactgaggccaggcaaggcagcccagttaagggagcttattccacagacaggcaatagctttagggatagctccctctccagttgctgggggatatacataaaaactgagctgcacatctgctacatatttgtggagggccagcccgtgtatgctgtttggttggctcagtctttaagagcccacaaaggtccaggtttgttgactgtctgagtgttcctgtggaatcctgtcccctttgggacccccaatccttccctcaactcttctctaagagtccctaagctctgttcagggttttactgtgggtctctgcatctgttttagccagatgcttagtggagcctctcaggacagttatgctaggcttctgtccgcaagcataatagggtcagggattggtggttgcccatgggatgggtctcaagttaggctggttattggttggtcattccctcagtctctgttctatcactgtccctgcatttcttatagacaggctaaatcttgatcaaaagttttgtgggtaggttggtgtccctatcactccactggggttcattcctggctgcaggaggtaacccctcaggttccgtatcaccactgctgtgagtctaagctaaagccagccccattgattcctgggagtctccttcatcctaggtctctgggtgttctcaagatgccctccgctctctacccctgccagctacaaatttccattcactttcctgaccctttctcctggctctccccacacttgttcctgacacacacatcccaactctgttccccatgtatttttttttaagatgtatgtttttgttttgttttacaagacagagtttttctttgtagttctggctgtcttggaactcaactttgtagactaggctggcctccaactcgcagagagccacctgttcttcctctaactcttgaatgctgggattaaaagtttatgctaccacctcctggctgttgggtttttaaatttgtgtgtgtgtgtgtctttgagtttctgtgtaccacatgcatgccggtgcccatggaatcgaaagaggtcatcagatcccctgggagcagcatttgggagctgttctctgcaagagcattaagtactcttaaccttcactaggctttctcatctttcccttttgatggtcattatgtcatagtttagagtcccttaattattccaaattcttaatatcagaaaagcagaggaaaggtgcctaccctcataggtaagaacccgaagtacagcggtggcataaccctcagaggttggtcaatgatgggttacgccagccatgcccgctactgtgcctggtgatgtacatcacggcaatagcaattttttttccagagattaactttatttttggattctggtataagttaagtctttttttttttccattttttattaggtatttagctcatttacatttccaatgctataccaaaaagtcccccatacccacccacccccactcccctacccacccacttcccctttttggccctggcgttcccctgtactggggcatatnnnnnnnnnnnnnnnnnnnnnnnnnnnnnnnnnnnnnnnnnnnnnnnnnnnnnnnnnnnnnnnnnnnnnnnnnnnnnnnnnnnnnnnnnnnnnnnnnnnnnnnnnnnnnnnnnnnnnnnnnnnnnnnnnnnnnnnnnnnnnnnnnnnnnnnnnnnnnnnnnnnnnnnnnnnnnnnnnnnnnnnnnnnnnnnnnnnnnnnnnnnnnnnnnnnnnnnnnnnnnnnnnnnnnnnnnnnnnnnnnnnnnnnnnnnnnnnnnnnnnnnnnnnnnnnnnnnnnnnnnnnnnnnnnnnnnnnnnnnnnnnnnnnnnnnnnnnnnnnnnnnnnnnnnnnnnnnnnnnnnnnnnnnnnnnnnnnnnnnnnnnnnnnnnnnnnnnnnnnnnnnnnnnnnnnnnnnnnnnnnnnnnnnnnnnnnnnnnnnnnnnnnnnnnnnnnnnnnnnnnnnnnnnnnnnnnnnnnnnnnnnnnnnnnnnnnnnnnnnnnnnnnnnnnnnnnnnnnnnnnnnnnnnnnnnnnnnnnnnnnnnnnnnnnnnnnnnnnnnnnnnnnnnnnnnnnnnnnnnnnnnnnnnnnnnnnnnnnnnnnnnnnnnnnnnnnnnnnnnnnnnnnnnnnnnnnnnnnnnnnnnnnnnnnnnnnnnnnnnnnnnnnnnnnnnnnnnnnnnnnnnnnnnnnnnnnnnnnnnnnnnnnnnnnnnnnnnnnnnnnnnnnnnnnnnnnnnnnnnnnnnnnnnnnnnnnnnnnnnnnnnnnnnnnnnnnnnnnnnnnnnnnnnnnnnnnnnnnnnnnnnnnnnnnnnnnnnnnnnnnnnnnnnnnnnnnnnnnnnnnnnnnnnnnnnnnnnnnnnnnnnnnnnnnnnnnnnnnnnnnnnnnnnnnnnnnnnnnnnnnnnnnnnnnnnnnnnnnnnnnnnnnnnnnnnnnnnnnnnnnnnnnnnnnnnnnnnnnnnnnnnnnnnnnnnnnnnnnnnnnnnnnnnnnnnnnnnnnnnnnnnnnnnnnnnnnnnnnnnnnnnnnnnnnnnnnnnnnnnnnnnnnnnnnnnnnnnnnnnnnnnnnnnnnnnnnnnnnnnnnnnnnnnnnnnnnnnnnnnnnnnnnnnnnnnnnnnnnnnnnnnnnnnnnnnnnnnnnnnnnnnnnnnnnnnnnnnnnnnnnnnnnnnnnnnnnnnnnnnnnnnnnnnnnnnnnnnnnnnnnnnnnnnnnnnnnnnnnnnnnnnnnnnnnnnnnnnnnnnnnnnnnnnnnnnnnnnnnnnnnnnnnnnnnnnnnnnnnnnnnnnnnnnnnnnnnnnnnnnnnnnnnnnnnnnnnnnnnnnnnnnnnnnnnnnnnnnnnnnnnnnnnnnnnnnnnnnnnnnnnnnnnnnnnnnnnnnnnnnnnnnnnnnnnnnnnnnnnnnnnnnnnnnnnnnnnnnnnnnnnnnnnnnnnnnnnnnnnnnnnnnnnnnnnnnnnnnnnnnnnnnnnnnnnnnnnnnnnnnnnnnnnnnnnnnnnnnnnnnnnnnnnnnnnnnnnnnnnnnnnnnnnnnnnnnnnnnnnnnnnnnnnnnnnnnnnnnnnnnnnnnnnnnnnnnnnnnnnnnnnnnnnnnnnnnnnnnnnnnnnnnnnnnnnnnnnnnnnnnnnnnnnnnnnnnnnnnnnnnnnnnnnnnnnnnnnnnnnnnnnnnnnnnnnnnnnnnnnnnnnnnnnnnnnnnnnnnnnnnnnnnnnnnnnnnnnnnnnnnnnnnnnnnnnnnnnnnnnnnnnnnnnnnnnnnnnnnnnnnnnnnnnnnnnnnnnnnnnnnnnnnnnnnnnnnnnnnnnnnnnnnnnnnnnnnnnnnnnnnnnnnnnnnnnnnnnnnnnnnnnnnnnnnnnnnnnnnnnnnnnnnnnnnnnnnnnnnnnnnnncagatgaatttgcaaatttctccttctaattcgtttaagaattgagttggaattttgatggggattgcattgaatctgtagattgcttttggcaagatagccaggcaatagcaattttaagggtggtttcactactcaccatcgtatttttcaagtagatgctactcctggagttagactgataaaatcaatccagtgttcgtcttctgtgcttctcattgtgtttattagtgtttgcatctacacctataaattggcctgtgacctttagattagtgagagtagaccagttcaaaggatcccccagtctgtcctcaagtatgtgttctttcaaagacacagcaaagatgtcttgggctgctatgcctgggtgaggtcaaagggcagttggaggttagttctctccttctaccaagtgggtcccagggattaggttcaggttatgagttgggcttggcagtgagttaacctttacccgcactatcttgatagcccttacaaacttctgaatgatcacagttctaatgttcaaaatgaatcggaaccttaaagctaaatgacagatgataactggtttgtatttgtcccttagattatcagtcatcagcgataaaatatattacttcatatagtcatagagcttttgaaagggaaagtttttgaaaagaagcttacgattcacttggacctgccctttcagagcaagctgcagcccttaggagaggcatccagtttcgcttgtggtgtttgctgcactgtgaagtgcttgggaaatccagagcctgcgtattctcttcactttacacaaatctctgttttgtcctacttataccttgcaggttatgcaaggctttaagcatgtaagtcggattgcagtcacatagctgcttttgtttgcaggcagtgtttaaagcatttttactgcaagcctcaggggctttttggctccttttgtctttctcgaagatcaagtctccttaacctattatgcttactgtgttttttatttgatatgctaacctgaaatgctatctctcatttatagttaatatgttgagagttagatgagtagaaatgtacttcatatgtagtgttgaagaacaggtatgataaaagtacaagctgggtcaaagtatactttacctcagtcttgtcattatgcaatgaattggccacttctgatgtgtcacttccctgtgccctctcacccttcacccttcacccttcatcaactggtaagcccagggcatttgtttgtttgtttttaagataattatctactactttaacgtgtggccttataggtaatcccccacctctacagctccccaccacccaccccagggactcactatgtagacttactgtcctgtcctggaaatcaccgtgtgtaccagatggcctggaactcacagagatccacctgattctgtctctcaagtgctagaattaaaggcatctaccaccatgctcagcccctgtaggtaatcttaccactttaatgaaaccaaattggaacagagttgtttacttagaaagctaataccttatttcccagcatctaaaggaagttctaggccaggggatgctgggtgtgattttctgctgaggggatgtacaaatgtacctcactcctctagacattctgagcccctcactaaaggaaggggaagtatcttggggttataaacctaaagctaaaaattcctaagcctagaagaaactagactggactagcaaggtaagatgatcgaagagagaagcaggtaagaagctattggagccaaatggccaagtcctgggatcccaccctttcttctacttcctgtgtcccacattgaactccccggaacgggatgctgcctcctaacagttcagttcagaagctttgcatgaatcatagggtatgtgatttgtttcttctctaggaacattgccctgaagtagcagtttcaaggggaataaaaagcaccgacttgaggatttactcatcagctgctcggccttgggatatatctatttctgtgcttgctggttcctatgttggtcctttagaacttactctgttcaagttgcatttgtgtttgggactttttgtcttatacttggagttaggcctgtacatacaggtcactaataagatgttctatagcaaagactttagataaatctttacttatcaagggaatatgctgctagaggtgaacattcttacactgagattcatttcatagtttacagaaactcctcttagtgttttgttaggtattaagtgttgaattttaatcagaattataaaatgcttaatgctctagtaggccttgtgctctattgcggtattttcaaaacttgctctgtaatacgaattaattgggatgtggataaatataaaaggagaataggattttgtggttaagtaagcttggggaatgcttgatgaaagaatttctttaaatactccaaagcctttaatgtgcttttatgcaatgtgattctccagaggaaaaggatatttagaaatatcctaaactgagctaacaagaaaacagtttggggagggctgacatgccaagaatccactctgtcaaatgtttgtagtcatagcctcttcatctttttaaaataagatttaaaatatatgtaggagtgttttgcctgattttacgtgtgtatatcacatgtgtacagtgcccatggaggccagaagagggcattggatcctctgaagttgaagtcccaggtaacactcactaccaagtgggtactgagaattgtacccagactctcttaaggaatggggatagcatacaggcaagacatagctgctagagtttcctggtatcatggtggatccatcaggattcgacactggaagaatcagatttaacagggcttacaggataaggttttggttgttgcgcccagagattgggttgccattgtttctgagctaagtttgtgtggtgtttttcttctcgatgtgattcaactgggttccagagagaaagataaggcagcaaagcgtgggttcacctgatgtgcaccccaaaggccctgggggtttgtgcatggggctgatgtggtaacggcccaccagtgggaacctagcaagctgggtggagacattgtggagttcagagtcagttctccacaaaataaaaacaggttggccattgcctgccagtgtatggctggccaggccgccgtggcagaggcacaaaagcaggaacatgcctgttccttttttaatatttccctgcaacaggtggtaagccatcttttcgctcttggcagttccctgattttacaaaggaaatttgtattgtctaggaaactgggaagtaagcagagcacaccagattcagggcaggaggtgacccttagtgattattttgtgaagtgaagggaaagggccgggctttgggggaatggtacattattccaccagggaggaaggaggagtgaagaagcttttaagaacattcaggcagtgtggctatcagagcctgctggaaacaaccaaggcccccctcagtgatttatgacggggagtgtggaaagaaggggaaatgacagtgaacaggaaagtggggaagttacagagtaggccacagacggcttttactaagagcgaagggtagactctggaaggtaacctcaaaggcccatgggtttggatccttgagcctccctggcagtgctctttggggagattgtacaagttaagaggtgaggcctgcctgttgagggtagattgccgggagaggtccagatgtaaccagcagcctcatgcttcctctgccatagctgggggtcactcccacttacctgcctcaccttccctaccttcatggactgtatcccctgaattaagggcaaaagacagcatttccccttcacttcttatcaagaatttggtcattgtaacaacaatgagtctaatatagggattatcggattggcaggcagggcatgggaaacagacctttgaacaaccagggttaccacacactccagttaagcactggggtacaggtatgatgattgaaaaccttagtcttggtagcaataggtaacctcacctataacaacatgagctacttacatggcagaactgctctttagtatagcagtctctgttgtcttcaccttggatgtcgtctgtcagacatagccaaccttgtaacattgtggcatgattttgtcatttataaagttcacatttaagacctctgtgatcaaattacagaaaaaaaaaatccacatctaagaacctcttgttttaagtaagtttacaaatttattttaggttaaattcatagctatcatggggtgcattcagcctttggactacagacaagacacacctggacctacatgtagcatgggtaaccacttacttccagaatcaccttttctctataattgacaagaactaaggttgagattcgggctttctcttaccatctggcagtggtggtgagtgggtaagagaaaggcaggcaagccgattgacctggggaatgagtccccaagtgtttaattcactgtaagatagatacagactgacctgcggagttgaaaacagttctttattgacctcataattaagttattcagttagcgatcataatgtacttcaactagttcagatacaaaaatcctattgatttgtccctagggcagctacaaaataattttaacagtgatatagttttgatacaaacatatctatgaagtctggacaaaggacagacttagtaaattctgcggtatacatttagatcttgagcctcagtttctactgggtatggggatagcagtgcaggtcatctaggaaggatgagaagtgacatcctgaaaacacttaaacactctgtcactgtcatcaggttgtacaggaacttcctcaaagaagagtcatcatctccattggccagtgtcagacagcattctgaagggaattctagctcacatgtagactggaatgggcagtgggaaactgttccatcacctttctatggaagggatgtctccagaaatctgagtggagagctggctggggtagagctcagtgctcttgtcagcattgtgactcggaaggattgggtaggaaccagggcctgggcctagtgcacaggccagggagcagtatgggatctggccagttgaactgaagttgccttatttttatccatcgaagccagggtaaactagtgtatggtaatgggggttgtcctaagataagcaccagataattatgtaaacatgatttctagtctaagaataatgtgtagtatttgcttagatattttacataagtaccagaaatgaaaccctaaatatgtttctctgcgtatacagaattattgaatcattctatttactgagctatatgttacatctttaaatcttattttgttcataaaactcctttgaaaaactgtatcaatagccttttggcagtggtattgtattagccagaaaaatgtgtaggatttatgtacttatttattatttatatgaatacttagttatgtattatatgtcaattgcatttcagatagaatctctgcaagctatttacaagcacgagaataatagggagagtatggggaattacattcccagctctagtgagttaccctggtactgcaaaacttactttgtgaagtgggtccagtgctcagcaaactcactgcaggtccagagagggcgtctctcgggtttgccctcagaacattgagctgctggcaaaggtgctactttttcttttgtttcatgaccagcctgataaattaagcactagatatttttgaatttcatatctttgtgccacttatcaatggctttaaaaattatttctttactcctttgttttcatcttaaaataatcatttaatgatatttaacacgaaaatgcttgttaggaaggcctgatccttgttcttgtcactggaaacagtaaccggaagtagttgaatgtggttgcacacacaaatgattcccagacatctggacatacttgctttttaccttcctctcagctggtgcatgtacgatctcacatgttcttgagcctgccatcagtcaactcaaccacttgtggtccttggaatgctgctgacactgagaagcaagccctgctgaccccgtgtcccgcccctggttaccctaaggttgaatttagttagcccttgacaggaaacagaagcctaaaatgtcccataaaatcataaatgggacttcagaatggactgaatcctaggtgtgctcaaagaatcccctcttacaaaatcagaaatgaatctgacaactaaggcataagtaaattatgattttaaaaataccaaaaacatcatctgttcatttctttcttggcagaaactcttgaggtactacttggaacacctataaatagtgtggcagcatataagatgacatgatgaagtcagaacatgtttatgtattatattgtgttgtctttaacagaagtgacattactcagtgagaacatgaggttaaagtgctttcctgtcctttgtaccgagccatacacagtgctgttctggtagtgttaacagatttcggtcctaatgatcagtgtaatgtgtgaccttcagcaagtctcttagactttatgctcatttgcaaactcagcttcgcaatagctgcccttacctatctgatagtggtatcttgatttttacaatgagataacctgtgaaagtccttagaggtgaaagcgtgtctgactgttctggccagcccccctccattttcctttagttctgtttttaagcacagagcatcatgcatgctggctaggcaagctgtagcaccagtccttaacttttatttcttcctgaaagaatagctaccatgtgctttaatgagcgttgtcctctaagccacctaagccggagtaaatggcagctgcagatcactttcctgtgtttgttttcctgccacacggctttagctgagaggaaggaatgtgtacgaacgacccacgtttactttttgccttcagtgctgctgccttttggtagaggtttatttctgtccaccagcctaccacgagaagttctaggagaatctcctctaacagttaaaaagtgtctactgcagatcagcttgctcggtcactggttctcaggattgtgaaacttttgaagtgaacatctccgcgtgacaaggagaaacagtggttaagttaaaacagtttacactctctgatcagatggttttagtggctagctcattgtgcaacagtaaagaatagagttagtgaaaattcataaagccatatataattagtctaaaaataaattgaataaaccacagtcagtcacttttctgccccttgctttttttgctgactagttgccatctgactgataagggagattagcctgagaaataaaaatctgccttcctatcctagccctgccagactgtaactttgggccagtctcgcaacttttgcactttggtctcctcatttctaacatgggacattagtagtatttgtcctgtatagctcagtgagccattgtacataaagcaacaagtatagacagagatctgcttgacacagtcccagccccatgaagggtgattgtgtacctgctagagactaatggcccaccctaactctgtatgatgtaactgtgtatggaaatggcccggagcaggtctgctgcttccccagaggagatggaggaagtttctgagctctaggacctgggaagagaaagctatgtcctactgtttgggtttttaaatggaagcctggagtacaatttctcacagaaataagttcaatagcagagtttccagaccagtctcttaaggaacatttaagcataagtagtttgtttcggtctactttctgttaagcattgaaagagctcattggttgtataggtatcagtttgtgtagtggtttggaggacttaggtgagagatacagaagtcatttctcttcggctttccatgcttgcctaccatgtgcaaggcttgcttaggccacatttgtaaataccagctcacactttagtcctctgccctgtgagtaagagtctgaaaccagctttctttaccccgagcgagacacccttttgagtctccaaccttcttagtgagcctgggaaccttgtgccattagacacagtgagcactattggctctgcacttgtgccattagacacagtgagcactattggctctgcacttgtgccattagacacagtgagcactattggctctgcacttgtgccattagacacagtgagcactattggctctgcacttgtgccattagacacagtgagcactattggctctgcacttgtgccattagacacagtgagcactattggctctgcacttgtgccattagacacagtgagcactattggctctgcacttgtgccattagacacagtgagcactattggctctgcacttgtgccattagacacagtgagcactattggctctgcacttgtgccattagacacagcactattggctctgcacttgtgccattagacacagtgagcactattggctctgcacttgtgccattagacacagtgagcactattggctctgcacttgtgccattagacacagtgagcactattggctctgcacttgtgccattagacacagcactattggctctgcacttgtgccattagacacagtgaacactattggctctgcacttgtgccattagacacagtgagcactattggctctgcacttgtgccattagacacagtgagcactattggctctgcacttgtgccattagacacagtgagcactattggctctgcacttgtgccattagacacagtgagcactattggctctgcacttgtgccattagacacagcactattggctctgcacttgtgccattagacacagtgagcactattggctctgcacttgtgccattagacacagtgagcactattggctctgcacttgtgccattagacacagcactattggctctgcacttgtgccattagacacagtgagcactattggctctgcacttgtgccattagacacagtgagcactattggctctgcacttgtgccattagacacagtgagcactattggctctgcacttgtgccattagacacagcactattggctctgcacttgtgccattagacacagtgaacactattggctctgcacttgtgccattagacacagtgagcactattggctctgcacttgtgccattagacacagtgacactattggctctgcacttgtgccattagacacagtgagcactattggctctgcacttgtgccattagacacagtgaacactattggctctgcacttgtgccattagacacagtgagcactattggctctgcacttgtgccattagacacagtgagcactattggctctgcacttgtgccattagacacagcactattggctctgcacttgtgccattagacacagtgaacactattggctctgcacttgtgccattagacacagtgagcactattggctctgcacttgtgccattagacacagcactattggctctgcacttgtgccattagacacagtgaacactattggctctgcacttgtgccattagacacagtgagcactattggctctgcacttgtgccattagacacagtgagcactattggctctgcacttgtgccattagacacannnnnnnnnnnnnnnnnnnnnnnnnnnnnnnnnnnnnnnnnnnnnnnnnnnnnnnnnnnnnnnnnnnnnnnnnnnnnnnnnnnnnnnnnnnnnnnnnnnnnnnnnnnnnnnnnnnnnnnnnnnnnnnnnnnnnnnnnnnnnnnnnnnnnnnnnnnnnnnnnnnnnnnnnnnnnnnnnnnnnnnnnnnnnnnnnnnnnnnnnnnnnnnnnnnnnnnnnnnnnnnnnnnnnnnnnnnnnnnnnnnnnnnnnnnnnnnnnnnnnnnnnnnnnnnnnnnnnnnnnnnnnnnnnnnnnnnnnnnnnnnnnnnnnnnnnnnnnnnnnnnnnnnnnnnnnnnnnnnnnnnnnnnnnnnnnnnnnnnnnnnnnnnnnnnnnnnnnnnnnnnnnnnnnnnnnnnnnnnnnnnnnnnnnnnnnnnnnnnnnnnnnnnnnnnnnnnnnnnnnnnnnnnnnnnnnnnnnnnnnnnnnnnnnnnnnnnnnnnnnnnnnnnnnnnnnnnnnnnnnnnnnnnnnnnnnnnnnnnnnnnnnnnnnnnnnnnnnnnnnnnnnnnnnnnnnnnnnnnnnnnnnnnnnnnnnnnnnnnnnnnnnnnnnnnnnnnnnnnnnnnnnnnnnnnnnnnnnnnnnnnnnnnnnnnnnnnnnnnnnnnnnnnnnnnnnnnnnnnnnnnnnnnnnnnnnnnnnnnnnnnnnnnnnnnnnnnnnnnnnnnnnnnnnnnnnnnnnnnnnnnnnnnnnnnnnnnnnnnnnnnnnnnnnnnnnnnnnnnnnnnnnnnnnnnnnnnnnnnnnnnnnnnnnnnnnnnnnnnnnnnnnnnnnnnnnnnnnnnnnnnnnnnnnnnnnnnnnnnnnnnnnnnnnnnnnnnnnnnnnnnnnnnnnnnnnnnnnnnnnnnnnnnnnnnnnnnnnnnnnnnnnnnnnnnnnnnnnnnnnnnnnnnnnnnnnnnnnnnnnnnnnnnnnnnnnnnnnnnnnnnnnnnnnnnnnnnnnnnnnnnnnnnnnnnnnnnnnnnnnnnnnnnnnnnnnnnnnnnnnnnnnnnnnnnnnnnnnnnnnnnnnnnnnnnnnnnnnnnnnnnnnnnnnnnnnnnnnnnnnnnnnnnnnnnnnnnnnnnnnnnnnnnnnnnnnnnnnnnnnnnnnnnnnnnnnnnnnnnnnnnnnnnnnnnnnnnnnnnnnnnnnnnnnnnnnnnnnnnnnnnnnnnnnnnnnnnnnnnnnnnnnnnnnnnnnnnnnnnnnnnnnnnnnnnnnnnnnnnnnnnnnnnnnnnnnnnnnnnnnnnnnnnnnnnnnnnnnnnnnnnnnnnnnnnnnnnnnnnnnnnnnnnnnnnnnnnnnnnnnnnnnnnnnnnnnnnnnnnnnnnnnnnnnnnnnnnnnnnnnnnnnnnnnnnnnnnnnnnnnnnnnnnnnnnnnnnnnnnnnnnnnnnnnnnnnnnnnnnnnnnnnnnnnnnnnnnnnnnnnnnnnnnnnnnnnnnnnnnnnnnnnnnnnnnnnnnnnnnnnnnnnnnnnnnnnnnnnnnnnnnnnnnnnnnnnnnnnnnnnnnnnnnnnnnnnnnnnnnnnnnnnnnnnnnnnnnnnnnnnnnnnnnnnnnnnnnnnnnnnnnnnnnnnnnnnnnnnnnnnnnnnnnnnnnnnnnnnnnnnnnnnnnnnnnnnnnnnnnnnnnnnnnnnnnnnnnnnnnnnnnntgccattagacacagtgagcactattggctctgcacttgtgccattagacacagtgagcactattggctctgcacttgtgccattagacacagtgagcactattggctctgcacttgtgccattagacacagtgagcactattggctctgcacttgtgccattagacacagcactattggctctgcacttgtgccattagacacagtgagcactattggctctgcacttgtgccattagacacagtgagcactattggctctgcacttgtgccattagacacagcactattggctctgcacttgtgccattagacacagtgagcactattggctctgcacttgtgccattagacacagtgagcactattggctctgcacttgtgccattagacacagtgagcactattggctctgcacttgtgccattagacacgagcactattggctctgcacttgtgccattagacacagtgagcactattggctctgcacttgtgccattagacacagtgagcactattggctctgcacttgtgccattagacacagtgagcactattggctctgcacttgtgccattagacacagtgagcactattggctctgcacttgtgccattagacacagtgagcactattggctctgcacttgtgccattagacacagtgagcactattggctctgcactattggctctgcaaaccaagcctcctggctgctctcaaggggtagcactaaagctgcccttttccttctgcagaccagctaagccttttttatgatgtttctgtgttcaagagagatgtggtttgttaaattcatataggatgtagctatcagctaaaataaaatattttatcttagttataaagtatatttacaatcttgcctaaagctctcaaaagtaaaggttgaagaaattcaatctatacaaaagtggccctccacactgatttgccatctgtacaagagggattgcagcagtgttatctgtttgaggaaaaaatattgttatgtatgtgcaaccttaaaataaaacatttataattaactcttttaaaaccacttatattctattttgaaatagcagtcttgtgaatataagggaactttagggatttaaagtcaagaaaaactgagaccgactttctctactctgtgagatgcttcgtgcttgagtttactaaaatattcggtccttttcataccaagcggagcctagcctggctgacgttcctccagtgtgtgcctcacagtatctgtcggcttttgttaatggaggctgagtttgcttttccctttggtactggggattggccagggcctcacgcatgctgagcatgccctctgtcatggagctgtcccccacttcctgagaatcatttcctctttgttatgtcagcctggagccttgtccctgattgcatagaggcaacagggacagagtctattcatggaagacagtggcaatgttgtctctctgtgtgtgaggctgtgtgggacgtgtggagagtggttgactgtgggaagtctggaggacaagccttactgctgcttctccgctacctgatcatgtgacattcaattagcaatcgatccgttctcccagtttgcttctctctgtttgtcaggaggataatggcacctcatacggtggtttcaagaattaaatgagggtcatgggctgtagagatagacactgggaaggtagtcattgtctctttcaatttctgaacctaagggtttgtgaagtgaaattgaaagaaaaacgggctggtgagatggctcagaggctaagagcactgaaggtcctgagttcaaatcccagcaaccacatggtggctcacaaccacccataatgagatctgacgccctcttctggtgtgtctgaagtcagctacagtgtacatatatatagtaataaataaatcttcaggccggagcgagcaggaactgaattagtggagttgactggagccagtggggcagctgactggagcaaacagaggtcctaaaaattcaattcccaacaaccacatgaaggctcacaacaatctgtacagttatagtgtacttacatatataaattaaaaaaaataactggggaaaaaacagaaataaaaagctgttttgggaactgttataatatcaggtggctcccccccacacacacacactgtcttgaaccacttctggagtaaaataatcaggggcaaataggttatagctagaggacttggagaatgaggatcatcatgacaatgggaaagttgctgggtaggtcggtcgctcaggtgggccatgaactcgtagtgatctgtctgcttctgcctcctgagtgctgagatgtgtatgtgtgtgtgtgtatgcgcacacacatatgtgcatgagcacacaaatgtgtgtaagaaccaccacaggtctggagagtttgggatttagcaaggtggtcttatagtgcgttaggatatacaggctgagcactcttgtctgaaacacctgggaggaattatttcagactcgagaatgttttagagttgaagtatttgcttacatagtgaggcatttcaggaataggacctaggtctggacaaattcatttgtttcatacagaccatatacaaaggctgaagatatcatgcattattttaataaagtttctgttgtgcctgcattgtgactttgatctactgtataaagttggctgcggagtctcctgccttggcatcatgttgttgcccagaaggttccgatttggaagcatttggaaactgaatctccaggatagggatgttcagcctgtaacaggatagggctgctcagcctgtaatggcgtatttttctggttttgtagcctctctgtagtctcagcttatcagctatcaggtgtctccttcagtggtgttatctaactcctgtaagtaatgatagacagagtgcattattctgaaaggtattccacaggtcgcaaagcacctaggcggagggctttgcttagttaactaatgcaggtttaattttcctgtacacagctgttactgtatcctgacagggagactcaagcaaagggcagtagtgggaagtggttttaatggaagaaagctgtgttcattatgtggccgctttatcagagtgactgtcctggactgagtggagccttcggaggccgagcaacagccgagagctcttggagcaccagtcctgcatcccctgcactgttgcaatgggaggcttgaaagccaaggagaggcccagcctttcatacttgcattgctctcaccctgcactgagacacagccagactgaaatcagacttaaccattagaaattgtatattgctgtagatgatagtttatagattcaaggagaaatgttaaattacctgatagataagcttccttggttttttagttattctagtctaagtaggttcaccttagaacaataggaagaggcaaaacagcatttccttgtcttttaggtcataatagaaatagttcttctggttaagacctcttgacttgtaaggctgtggctgagatcgaagggagacaaggaatatggtcccataagtactccccagactgggcttcctgtgctaatactcagaaagaataggctttcttgcagttcagcaccagtcctttccccttccacgtttctgcttccccagtagacagagcacaaacgtgtgtccctaggccacgacctcctgcccttgtgtgcacagtcatacatagttcatcccatgccctggtgcagacactgacatctcttactccatgcctctccgtggatacactctgacatcttttcccccgtgccccatattccctatgtacactcaggtatctttcacactctgacctctctatcccacacctctcatgcacacaatctcatcgtttatttgtttagttttttgtttgtttttgagttaggttttttttttttagtttagtttatttgtttagttttcattttgtttttgagttggggttttcttatgtagctcagactgacctggggctcactctatagccttctgctttagtgcaccgagtgctgggattgcaggtgggttccagacgaacatgagacttctttctccgtgtcctcggtgccttattcgaagattccaatgcaaggtggttcctcaccaccactgctgagttatggagacaaaagaagcttatctaagtatgtgtaagtttgaggtctttcatagttagaactttgaatgctcagaacattcaatttgatgcagtatagatgaagggaaggaagcataaggttcatgtgtgctgagagtataatggaaaaagctagggagttgtgctggctaatctcacgtcaactggacacacacaccggagtatctgaaaggaggggacctcagatgagaaaatgcctccgaggtagactggctgtaaggcattttcttaatgaatgatcaattggggagggcccggcctattgtagatggtgctattcctagaatggtggtcctggcttttataagaaagcaggctgagtaatccagtgaacagcactgttctatggcctctgcattagcttccaggttcctgccctgtcctgacttcctttaataataaatagcaatgtggcaatgtaagccaaataaacccttcccttcacaacttagtttttggtctggtgtatcgttgcagcaatagaaaccctgactatgatagagtccatcttaaaacaataatgctctaaaggaaattatgctaaagagataggaaaagactagatatgaaaagagtggaataattttatttccttttcaggaattataccagttatttttctccttattatgactatgcctcataagaagcaacttaagggaggaagggctcttttggctcatggtttaataagaagggatatggtttaccatggcaaggaaggcatggcagcaaaaatgtgaggcaggagcctggcacgtgtgtctgcagtcaggagacaaagagcagacaggaagcgaggccaggctactaatactaaggccaaggcctgccctcagtgacccacttccccaaggctctgtctccaaacagctccactaactggggaccaagtattcacacagtgtgagcctatgggcgacatttcacattcacactgcaacagagacatagtctttaatcttatttgaggaaatatatgttctacaatagaagtggaagcattggaggactagctcattttggtatccttgaggaactgagaacaaggaaggagaggagggactttagtctttgatagaaatgtgtgtgctgagtgacgcctagaagtatctgctgaaactaagctggaagtcagtatggttgttcaaaggtctccttagtcatgtagttagaatatttcacttgataagcagtacctggcttatcattttaaaagacttagaagaatttttgaaatcactgattgatgagtctgacttgtgtgcagcatgttttgtgtgaataacttgtgggttaaaaggtatctcttaaaatacctgcatcacaaattcatcacaaggaattggaaaacagtggtaacagcttaagttctctgggtaaacgctgagttatgcttgagtaagccctcttgataggtgcccgagaatttctgcagtttaggctgcacttacaggatgggaggaaggagaagaagagggaaggtattggtcctctgctcccagctgctccttcctcttcaaggttcccgccatatgtggtggatgtttgtctcagttcttttgagatgctctaacagactcccatcagtatactcatgcacagcagacgtgtgctgcacagctttggaggctgggaagttaagattaggacagcagcatgtcagtgtccagtgagagtccactttggtcagtctctgttcataaggtagaagggccaatcaggctccttaagagctctgggttccttttttaaggacataaatctgagcatgtgtcagtgttctgccgttaccacagcaccttctagaggtgtagggtataatatcagcacacacctgcaaaagtcacaaacatccagaatttgacaacagcaattccttgtcatcctgtgatgtccaccttagttatccttgttagttgggcttccttgtctcatataaataagggtggtgatactaacatggcagtgttttgtggtaccttctatttctaagtggccttatgaatataagcatataacttatatcataaaacctcacctttagcatataacctcacctcagagttcagcagacagaagagcaaactttctggtacagatgagaagcccaagattgacagttaccttggtttcccagggtaacactcctagtgatacatgcagaggttgtagtctcttgtcctcttatgtgacatgtcagtgttgattgatgttacttcattccattcctttaactttcatatcataagcctgattttgttggctagcttttggccactccttcaaacccatttttttttttttttttgtaatgtgaattggtgtgaatgtgttagatctcctgaactggagttacagacagttgtgagctgccatgtgggtgctgggagctgaactcaggtcctctggaaggtccgctggaaggaagccagtgttcttaaccactgggccgtgtctccagcccctcaaacccacgtctggtgcatctctccagacccatcagttcttggtattcttacttagtctcttgtatttcacactgtgcacatttcctgaagatggtgccttgctcataactaacatttgtatctttatgctgctgagtcccccatccttgtttcgggaaatatttaaaaagaacagcaagttcctgtggtacgcctagctactctcagccccttcagtctcctcggccagttcttatcttgtggagcctctctgactcaaagttccaaaatctctccacccagctcgctaaattcctactggcaagttgctaccacgccagccccatgctttaaacaccccatggcctttgtggtgcacatcaggaaaacccacgctttgccgcagtacctcttgaactcagatgagccgtcatgtgaaggaaaacacaacacaaacttgttcagaaacaacggtaactcaatctctgggtgcacaacgcacaactagaatcctaatcttgtaagctacattttatctaaatcctctggtggggaatcttgatggatttgcccttgaaatggggagacacttgtagctacatctcatctgcacactatcctcatctaaaagaccctttctccttcctgcttcctctcgtcccccctttccaaccctgaagtccctcctactcacccagtgattggctcctttattcattaggggatggtttacaagaactcacctgagtacactccttgtccgaagcccctcccaggagatggaattagcagcaaaataccaatagcacatccacaacacagcctaacctctagtccagatttcttgtatgaaaacccaatacatgaagtcactaatacagagttaacatttctttattttatggagctctaggcttcttattgtcaacattctagattttaaaattccccttgttttgggggagggaggggtgaatagctttccgttagtagtaccttctaatcagtaggtatttctcatatcagaaatctggcttcctcactccttttagatcatcttatcttacttcccacccccttaagctatacactcacctccacccctgctttcacagtttcaagcccctcccagcgtaagcttgttttctctagcagcccaagagctctttggacatttgaaaatttgccttgccaacaatttcctgtcttcccttattccttatttcctaggcttcaaattcaaactcctttgtgtggcttctgttgcttacctatgtggtcccaattactgtccctttaggccagttctgagataaactcactccacttgccccagcaagtgcttattgtagggttctttcttcagcttgttctgttttggcagacctatctgaggtcatctgattcctcggatgaagggatttccctgtatgctttcctaaccctctttcattatttgtagccaaagcctactgctttcttcaaaactgcctcttagatgtggatgtgtagctctggtcttttcatttccacatcatagggcatatgattttccagaactaaatttaaatggtttccttccagattatctacttctcagactctcacatcaatttaatcaagcaaagctccagagttgtccagtttctcagcccatatctaaaccatcaacaaagtaatttggtcttttctcagcgaataaatagttctttctcctttctcaaatgcagaactgggatctgaccacctctcactgtcctcagcctaaaccgtgccttcatcaccttatgcttagacagctgttacagcctactaagtggccgccttctgctagctttcttaaaaccatcctaatcaccagagtgagaagcagatcttctcattcctcagctccctagtaaaggctgatgcattccatcatctgctgtgccccacactctgaccttgtttcctgtctgtctctataactgctaagactccaggatcaccgccctaatttctttagctccctgtagaacattattttaaagccgtctctgaccgcccatcacagaagagtttactgttcctaccttatttggtggattattttccattcaaccagagtatatactgcaccaggctagggacttggtctctccattgtgtcttcatcttaccttgagcagttgtggcccctcctaggctcttgggacatagttgggaaagtccactgtagaaattaagttttaaccttagtgatttagcataccttccagaatgagggcccaacagcaacactgagctctttgggtacttgtacttagactaccccttagctttgacttcttgtcctggacgaggtgttggtttagtgcttacttttccttctgtttgtttgaaggaattaagtgggacagtgactatgaagtaccttcatatctcagtacagtacagatagaaaaaaaaaaggtctaaagctaaaaccatgtggctgaagatgctaagttctgcttgttgtgactggaaaatgactccctcattcaaatatatcttcatccactttctactttcagtgatttcctttattgcctaagcttggctgtcctgaaacatgctctgtagatcatgctggccttgaatttagagatccctagttctgggattaaaggtgtgtaccaccacaagtgggcctaagcttttctttaaagttggagcttagctgggtgggatgttgcccactctcatattttacttaccaccatagctttctttactagtttatctccttgaacacagagcttagctccgttccattccccggtgctccccttcccctcagctgtacagtttctatttttttcttgttcatcttgttccttttcattgtagatctctttaagaacaaatactaataactacatgacagagtcaatgctaggctgttttgagatttttttctgtcaaattaataaatcagaactctttaatttagcctcaggccgactttttggacaaaggcagaaagcagctacattcttcaccgaagtatcacaagaatagtctccaggctacatgctaatattattctcctctgagatctcttgaaccagacctcacagttcaaatcactctcagcaccactgtcttccatgttcttactaggatggcccattaagcaccatttaaagcattcaactaattttctaatccaaagtaccaaagtctacatttctccaaacaaaagcatggtcaggcctatcatagcaattctccagtccctggtaccaacttcttccttagggttttattgctgtaaagagacaccatgtccatggtaactcttataaaggcaaacatttaattggggctggcttacagtttcagaggcttagtccattatcatggcgggaagtgtggcagcatccaggcggacatggtgctggagacgtagctgagagttctaaacctgggtctgcatacagcaagaaaggtgacatacttcttccagcaacaccatacctactctaacaactcctaatagtgctactaccagcagatctgtgggggatattttttattcaaacgaccacaactgtttttctttctcaataattgaagtgtcacaagcaagggccaggatgacatctgtatttttgctacaaagaatttatgatgtttccaagtgaagtatcactaccaagataagaaacttctgaaacctaagtatgtttaggaattccagacagatgagttcagctgcttactctctggacagatacacctttctttaaggcttacatttgtagaaacagtagcagcagcagcaaaatgtataaactattaggaaaaaagagtaagaaagtataagagattagttaaacacacacacacacacacacacatacacacacacacacacacacacacacacacacacacgcggaaatatgaatagagctggccttgaatttgtctagaatcccagtgttccagatgctgaggcaagactagcacaagtttgagattagcctattaagaaaatagtaccccctccgcccccccccacacacacacccctcccttcctccctttgcccttgatcctgatccattgttagtacttcgctctactgttcattctatgatcttttggcccttgccatttctcagctgatgatgatgctttgtcgccacacatacggccctaagatcctggttgctctgtctgtatgtagtggcttctgtcatccattagcttttaccactacatattacaaaactaagagatccaccagaatcacacctgtccttttttactctacagtagcaataatcctgattacctttgacagtcacaactcattgcctcaaccattttttttccttctttctgtctgtgccatgagggactcagaattactaggcttttacttgaacttccaagtcagtagaggtattgttgagtccttggacaatcattctttgcttgggttctgggactgtccaaccagtagaaccagagttgctataaaatatggtagggtgggggtgtgaactggtcttcagttatgacagaggggaagagttgtgaaactagttctttccccctctgcctgtccactctggctctaggagaaacaagatctgttactctctggtttccagtatcaacagaattccaccttacctaatctcatgaggtgctagaactgagtctatcagagatgacttccgctgatgatccttggtttctaactaagaggacacaagtcttattagtattaacccacatctttgtactgtttcactgtccttaagtgagatatcatggcaactgataaggcatggttcattcagtgggtgagagaggcatggtggatggcaaagacagttccaggtcagagtgtctcttcatgtaagaactcacatatgaccacaagtggtttggatatttgcctggagtcttttatgctttcacagtgttgttggtgtgaaagggagacttgaatgagttggttctttctgtcactgccacactttgacctcgtgcaagatatttaactactgtgagctatctattcctcacatctgtgaaattgagataaagttgcttttttaaacttaaggctttgggccacttggagttaaaagtgcagatgttcactagcaatagctacagccctcatcccaccctaccttagggatggactttgttagctgagcacttaaaaacgttgtctaaaatggcaccctcaatatttacttcattagatgctcccctaacatctgagaagctttcttcccagtgcttacttagcacagtgtgccataagctcttctgactagtaaagaatgcctggctccccagctagacccacaccccgtgagagcagtaggagcagttactttgttaatccataagtcttccaatgcctaggacaggttcatgtgtaaaagatattcagtaaatcactacattactgagtggatgaatacataaaccatatatgtttctttaaatattgtcaaaaaggatttctctaaaacaaacaagcaaacaaattctgataggtgagattagcattttcatgtgttctctctggaaaatgagaatcctcaagccatatactgagtgcaccagtgttcctgttgttcccagtattagagtgggtatggtgccatgagcagcgtactcgggtgatttttcagcatcatgagtgcttacatgcactgagcagcagatgcttaaaggtggtaagctaccttacttggctgccatctttgggtgtatcctaacaggactgatcattaaaaccagatcaatagcatacctacatatttggccttactctttctcaatttttatctaagcaccttgaaggaggaaaggtgttcatgtctgattggaactgctcagtggtggtgttacaacaccttggcaaactgtaaagtccacttggtgtgtcatagtgaaccacaaggaagtacttttttctccagggtttagttagaagtcagactcttgctaactaatgatgcttgaaaacatatcaaactataaataatttggtccggtagattatacaacagaagttggcatgagataagggggacaaaaggtctgtgctggccatcattaaatatatatggatatttcttaagcatggaagcagtataggaaaatataaattatagcatatctccatatgtgcatgtaacaagggtatctacagtgaaagcacagagattctctattgaaacaccttttttaaaaaaaagatttatttatttattatatataagtacactgtagctgtcttcagacaccccagaagagggtattagatctcattacagatggttgtaaaccaccatgtggttgctgggatttgaactcaggaccttcggaagaacagtcagtgctcttaaccactgagccatctttccagcccctgaaacaccttttaataaaatttttaccaagtccttttgctacatctaggtggaggcagtgttggcttatattggtgtacctgtgtatgatgagtttgtttggtggtatgtcataaatgtgggccaacatccataaatgcttcagtgcttcgcagaatgcctagcgttctgtcgggtctcagtgcctgtttgttgaaggagtgttctgaggacatttgaggcagtctctgtagatttttaggattagccaggtcccatagcttttttattgagctgaccacaaattagaaattagaatactgaatcttcttactaagcagaataaaagcaaactgttccgctaatatatgctaagtgtgcttaacttttaaaggaagactggaaagcattgggtgttttttatttacctaactggtcatctgaaagtcaatcaatttatctgagactctgggttcagttacaagaatgactaattttatactagattctcacatgattcaagaagtgtgtgaatgactcagaccattaatatctttcactcctgtgatctcccctcccagtgcgatgttgcctgtaaggcagtaatgataattgcaggaggaggagatcttgactttgcccagtggcaataaaatgacacacttttgagtaattacatatgcatacagtattttacagaagaaatgagctatattatcatctcataactatattaatattgtatttgtatgttgtgaaagtagtgcgcagtttcagtagaggttgagttccaccttttgcttctactcgtaccctcccctactccctccccaaaaagcaaacaaactggcttttgttcagtggaaagacttgccagcagaataagtaagtgagctcattgtatgtcccttgctgacagaggaaacactgcagtcacaagcgtccaggtttgagtgttagttaaaatgtagctaagtgaccagagagatggctcagaaggtaaaggtacttgctaccaagcctgatgacctgagttcagtctcccagaccctcacagtggaagggagaaaacaatacccaaagttgtcctttggccactttacatggtcagtgtagcatgtacatgcccacatgcatacaaatcaataataaaataaaatgcagctaattactcacaattgaggtttgagcctaaactgagcagctcattgaagactgtttggtgatttgtgtgttttctgcattactgcctcatctttttgaaatgaatcattgaataaggtctgggtatttggcatgagcttctgtgctttgcgctactcttgccagagtcccagatgactcacactgagtcggataggcacttctcagtctgtgtttagctcaacctctctgagacatttgacacatctaaaacatttcttcccaaaattttggggtacttgcttttgttgccttgttaactcttatgggtttttaactcttctagctgcctgttaaatgtaatattctccaaagttctatcctagtcgtctttgtgcttccacttattcagtctccttggtgatctcattcatttccatggtttccattaaaatctattcgtggaggcctccatgtgggtgtctccagtcttaacagtgtagacctgcgaatccagcctccttgcagatccgcctctataatgataatcacaataataatcatgacaacaatagcagcttcttattatagaacactgtgtcaggtggctaagggctttattgctttgttccatttattttgagcaactatgaaaaattaatactgttattttctaccactatgagtggaaattggtgttggatgtataaagtgccttttctaagatcatagcagagttttatattccaagatcaaatttttaatcttaacaccttagattagcctgtccaggtggattctatattgtcttcttgtacacacataccttctattgccctctgctgtacatgaaaggacacttgagagctggaaatggaattcgatggtccatctcttccctagcctgagacagatcctgggtttatcccaagcactagacattcaaattctgcaggcacagaagcactgtgtttacttattgttgcttggttttttgtttttgttttttcagacaggatcttagtcaacataccttggctttaaactgtgtggccaagggatgcccatgaactccttgatcttcctgctttcactttctcatactgagatttcagggccaacatgagcatgcaaccatgcccagtttcaaaattcacacacacacacacacacacacacacacacacacacacacagggggggggtgagggagggaggttagttattttacaaagcagaaaatgttccttgtaaattgaatttctaatttaaagtccatagcctgcattcttctgtgcagcagccatctagagcaaatagcagctcttttacatcaatttgcactgtcttggctattccctaagattctgtacggatctttgctaatccagttctgagcactccagtatgtggtaaagaccactgttcacagctgggcagtagtggcacatgcctttaatcctagcacgcagaaggcaaaggtgggcatatctgtgagttcaaagccagcctagtttacaaacaagttcctgtgttcccagctcatatcttcatgattcttgatttttttttcaagtgcaatccattgcttgctcttggtattttcatttatgtttccctgttgcttctttctctatcttcagacatgctaaagcagctgtgctcttgttgacagggaagaaatccaacttttgatcatccaaagtttaaacataagtagagttttgttgtttcaacatcactgaagtatatacttctggcccctaataaagaaatgacaaaaatctaagcttaccagagattgtctgagaccatagcctgaagtagaaccaggtctgttccaaggtccatgccatgttacctatctcacttgaagctgctgtcatcctctgtacaaatgacatgactgcctctgcttcccatgacttggttcctgctgcttggctcctccttcccactacagtctcagaattctcttagttctggctagcctggcaaaagaagaagggagggaaaggaccaggagcgaggaatgccacagaaggaaggaacagtttttctcaagataatacttgttttagcaaaagggaaacaaagctcaaggtagaaatcattgaaggcaacactgagcgtccctgccaggcgcttacataccacagagcagctactgactgcctaacctgctggccaagagccgtctttcatgcaagggtcatcatgatgctagctagctcacaggtgctcaaccagtgccagggaagatggattacaaaaatgccaaatgggagatgagtaaaggaagttatctttgccaagccagccataactactaatcaagacgtgcttgagataaaggggaagatgtctggtgcaggcatgtaacctatgctacttgggaagctgaagtaagaagattccagacttaaggtctgcctgggcttcagagggagttcaaggccagcctgggccatttagtgaggccctgctttataataaaaaggataaagagggcttaaaatgtagcttagtggtgatattggtctagcatgtgtgagaccctgggtggttcccctagtactccaagtgaaaaaagaaaaaggaagcataaataggctctactgccttttgttatatatctttgttgtaattcatatattcatatatatatgagtacatatatatatatgagtatacatatatgtgagtatatatacatgaattatatataatgttttagaatgggtggatggaaatagatgaatgaaaggatgaagatagacgatagagagagatggatggatggatgataatgcatgtgcttgtgctttgaatatttgacaagtttaataaataccaataaaatgaatattatcagttttgaaattttgcttagccctgaaagggtagaacagtttattctacaaagtatttacttgtttgtttgtttgtttgtttgtttgttttctttcgttcattcattcattcgttgtttttgaatcagtctccctttagcccaagctggccttcaacttactgtgtatcctaaacctatcctcaaacttgaggttgtcgtcctgccttagtcttccaagtgctgcggttccacatggtgccattgagttgaagaagcaggaatgaggttacttctgtgcagtgctgtggattggaccttgtaccgtctaggcaaataaatgctctacttagttcatagctccagcccaagcttcagggatttacaaaagttcctctgtaaagaagttatttctaccaccaactattcaattttgtctgattttaaattaaagttcaactttaacttgaatatttatcattagaggaacttgttgatatgccatgtggagaatccatttgagaggctggagacatgacttagcagttaagagtgcttgctgccttttcagaggacctgagttcagtttccagcacccatacctggcagcttacaaccgcatgtagttccacctgcagcgggggatccaggaccctcttctggcctctgagggtgttactctcatatgtacaaacccacactcaaacacacataatgacattaaaaatacataaataaatagataagtaaaattttttcaatattaaacaagaattataaacatgattttatatccacaaaaaatgaataaagagataacttaagctcactgccgtgccatcattagtagaccttagtccagtatgactaatgaccgaagaggagattaatacataggcacatctgctggaaggaccatgagttggtgagggagaagacaacgtttacatcaagagaccgtgtagtgacacagaaaaggggaagacttgtgtcatgagaaaggactacctcgtataataggagggcgtttcatagctccagagaagatgaccaaatacagtgagaagtccacatcatggcgtggaagaagatggactatcagcccagtaaagaaaccaatgcttctgtctctgtgatcttaaatttctagacttcatatctgtaaaagtgaattcctgttgcttaaaccacctaaaaagccttgttgcttcatcataacagttttgtcaaattgacacatatgtggtgacctatttaatgtaatacctcttatctatctgttaggtactagtaatagttagtgataagtcagacattgtttaaaaagtttctgtcttattcagagaaaaagacaatgttgcaaatatgtgtagtgactgtcaacacaatggtgagcaagcaggagaagcagggatgtgttaaggaagcagctagaacctacgggtgaagaataggaagtaagacctggagaggtggctgctcttccagaggacccgagtttgattcccagcacccatgttagatctctcacagctgtctgtggttctagtgctggggcaggtaggggttggagagactgtcccacatttgtagcctccgtggacacctgtactcatatgcacatacccacacagagacacatattatatgcacataatttaaaatcataaagatccaagaaaggcgataagagtgtcacaaaactggatatcaagacctttttctaaaatcagattatatgaacactactgataggccaatagccatatctcactggtgcttaagattttccaggagaggctggggtataactagtggtggaatatatgtttagcatgaaacaggtccaacccccatgactaaaatgaaaccagtgctaatggtggtagccccagtgctgtgtacaagacctgctatgtctaatttttcactttcccatctgtaatatgtaaggttatgtcatctctggtgggttctgagaagatgaaatgttggctattcacactaactttcccactgttaagcccttcctctgcagccctctaccatcaggctccgcccctgggctactctgatggccaggcctgacctctccaggtgtgagtggccaggctcggccccttaggagctccactggacaactcctcccagacttcccaaatggttgtaacagctcctcctctcctgggtaggagaatggccaggccccagcctacagaaaaaaaaagcaaacaaacaaacaaacaaaaagctaccaacccctgagcttaccctaagatcaaccacaaaatccttctaatgctgggccactctggaaagctctactactcccagcttccaaagagaatacacacacacacacactcattcattcattcattcattcctgtcacctgcttggctttctctgccatccttctgggttttcccttcccagtaacagcttgcttctttctgaggtttgttgtgtgcatgactttgtggtatcgcttgactccccactgctagggtactttctcatccatgctctaacacttaattgtgaacagttagcttgttctggcagcagctccattagtttgtcatcagagagtttgcaggtttactcttcacgagccaggcagttgctttgccagctgtcctccctgcctttgtcctacaattattcctagaagtctgcgtaataaaggctaaattgcttattgttttctcctcactagaaatcttgctgtttggatggaactatttggccttaaaaagcttttgcagtcggaaattggtgaggaatgagtgggagtgcaggtagtgaaaatatttaagacatcaagtaaaatttataattactcagctttgcctagccaattcttggaagagtagacccaacctcagaggtctccaactgccctattgatgggggggcaaactgtttaaaccaaggtgctgtcagccattccatcaaaacagagtggaaaccacaaaggcatgggctacgctcaaaaaacaagtgcatggaaggaagcgccagacttctaatagagtgctgttgttagtgctgctgctgctgctgctgctgcacgtgtgttctaaagcacctgagggtctagggaagttaattaagacagactcaagagcacgatagatgggaagagatgtggaggggcaaacacagtcgagtggtaactgcagcagtgatgacatacatagtgttcacaatccagtacctttaatgtttccgtgtggctgaactttataatacttagggagaagaacatacattgagtgtttggccttgaacagaacaagcaggacactcaactccttgttagaccagggaactgtagaaagtcaaaaccttagtttctcttgttaatgtagggatcactgtcacccacagatcaagggctgcaagaggatgctgaactgaagatggaataaacactattgcatgtagagatgggctgagcagatccaggtgaaagaagaggggtgaaggccaggtctgggccagtcgcctcttctgcagggtttaacaagttcatggacttagtgacaggctgtgtagagcaggaaggcagggtgggcgagcctgtcactttttctgagtagtctcgtgagaggatctgttctctctcatactgtcttttgaattaaatgagattaagacagttgtatagcccttgttgatactcattatctctaacgaacatgaatttatggtctttcttaggtaaaagaagaacgtccagaaaaagtaccagatttaaaattactggtagagaagaaatttttggctttacaggataagaactctgatgccgactttaaagagaatgaaaagttcgtgcagttcaagcaacagctgagggagctgaagaagcaatgtaagtcagccgcttcgctctggcttcttgagatgaggggcctgacctgtgagcagtgtccgcttctctgcttgctccatcctctgcctgaatggcttgtcttgttgcagtttcgtgtttgtctaatactgattccaattgcctgtctatttctgaagccaacagtttccacaaagtgtctcactgctggggaggggacttgggaaaacaaaataaaactaaaaaccattttattaagataacaatggtaattctttcaaaacgtaaactgctgtgccaagctctgaagtacatttgttcccatttgctgctgtggggcagcgttggtgaggtttcctcggggattcctcccaaatgcttaaaagtccctctgatactgtaccctgggtactataagttccatgtgattttaaaattggcttaaatgcttgttaacagttagggttttgacttgaaaatgagagtgaggaaaataattcattttacatacgcacacccctaccttacagagtgtaccagaaataatatatcttctccacagtgaggaaaataatccactgtgtacacacacagacacggacggacggacagacagacagatagacagacagacacacacacacacacacacacacacacacacacacacacacacacacacagtaccagaagtagtaaaccttctccatgtggtcctcagagcaatgttagtgagttagatctttttttttcttgtctaggcagctgtttagttgtatagggatttgtttgtttgtttgttttatttgttttaggattgagacacgattgttccttaaagaattgaagaggaaagtgaatgacttttttccctttcaaacgttagccttctttcacacttatgtgtacactgacagagcaggatgttatgtgatgtaaattcattttgtgtctttctatgtacttagtgtagagattcatgttttgaagttggctttcttttggtttttttggttttgtttttttgtgggtttttttttttttttttttttttttttaggttttttgagacagggttttctctgtgtagcccttgctgtcctggaactcactgtgcagacaaggctggcctctaatccgcctgcctctgcctcccaagtgctgggatcaaaggcgtgcgccaccatgcccggctgaagttggccttcttttaagtaaagtatttctttaaattggtgctgagatctcaaaaatgactgaggaagctgcttcacttttgtctattttacaaataacttaagtttcacaatttagaatgttttgcaatcctgatgagactattgctgttctgtagatctaaacagtaagcagtttccctcgatttggttcttgattgagcattgtcactatcacaatctttctcaaataattttatgcagttccccagtagagcagaatccccagaagagagaaagtggggctttcaggttttatgtctgccatagcagacatgtttgtaactttagtgcccttgaattcagtcttacacattatgacagacctaatgcctcacctcttattttaaagatattttataataaaaccgaggaataaatatataaaaagtatgtttcttcctcctttgttacttattcacaaagttattgttccataaaagaaattatagggaattttagaataaatggtcttggggaaatttctaatcagaagcatataatgcaaccaaattaatgtttaaattgtgattattacttttttaatatggggaaagagaaagagagaggagagagaagagagatgtgcttccccaagtccagccatatacatcatttggatagttaaatctaatgacaagtaaatttatattgaaaagaacacttccttatgtaagagttccccatgcgttgcaacactgggaataacagaagtttccctttaatttcccctgaaatgttattttaaaaggtcctgatcttaaatagcagagcaaacaaaatatcaatactcttttaaagtgctatataagatactttgtggcgcttgcaaaatggaattgttagcttagtgttttgagtactgccagttacttctgtagcatgtctgataggttttgttctttagatttcactctgctgtgacggtcctgatggaacaggcttgtgcagtggttatgtgtccagatccaaggtacactgtgacttattaaaggggctaatggatccatccgctttgaaatatgttctggagttaaggagttgttgtaatttgtagtaataatatttggttttttttttaatttggaaaatataagtgagagggagacacatacacaaacacacacagacaaagtccctcatctgtagttgcctgttttgatgaagtaaaagctatagtgagaaccctgcaggcatgatgacatgtacctataatcccagcacacaggaggtagaggcaggaggatcgctgccccgtgaggccagcttggactacatagtaagttccaggctatccagggctatatgacaagactctgtcttaaagataaaaaatgactgaagtatgtatataaagggttgttcttttatgtaaacaaccataatattttctccatattcctcatgtgagctacagttgcagggaatttaagttatcaaatcataattcagttaaagaaatgtcaggtagttcttgaatggggtaaggtcaaggtgggggtgaaggtggttgagtctggtggacagtgttctccactgcactcacagttgaccctgctaagcagctggttctcatgccttgtgatcctgtgtccctttaacatactgaaaatagacctctcagggttctaggtcacatggtgtgtgtgccttgtagtatttgtcctattagaaaccagaactgagggttaaaataataataatctattttaaaaactatgcccattatgtgttaagtatagataacatttgacatgaaatattactgttccccaaacataaggaaaatgtacggagattaggtggcattgtttcttatttttgcagttctcaacttctggcccaaaaagtagatgagtcctttcttgcttttgcattgctctatagcaatgcctcgttttggttgaagggaagtctcatatgctggtatagtagtcacaatttcagaccaccagaaatccccattttgaaaacactagatctgggctgtctatggtacaaattcagcttacagcttgggaatagtttttataatattagggggagggttcaatcattggtgggatcaaaacagggaaagataacatgaaaatctgctttgtatctaggttggttagagcccagacgtgctcactaagttaagtatggtctgtggcagctttcccagtgtcaatgcagaacccatgttacatcacaaaccactggcccacagaacttataatatttactatctgcttctttacaggaaaggttactgattcctcatctaaactacatccacagattcttgggggtttgtttgtgtgtttggttggtaggtttttttttttttaactgtagatttgcccataaataccatgcatttagtttatatatactcagaacacttttaaatagctgttctatttcatttatgtagttgatactcttaaatgaatacaaataagaaacttagcacttggaaaaaacaatcttattatgtttattgtgtattatgtaatgtgaggagagtgagagcattttatctttatctagcttgctcatgtgttctgtcatcaatagaggctctgtggaccagagtattcagaaactccctgaggtggggtctaggcttagcaggaaagaaggtctaatgtgaaagagtgggaaagaggaggcagtgcaggtgctagcatttaccatcgctagactagaaaccgactggatgagctatgcttgtttaagggtagcatttctccaatggtagcatgctttatttgcgtctaatctgtagtcacaacatcagattctttgaagacattatttttatcccttggacacctactcattgttgtggtaaaagcacccggcagaaacagcctcaggtaggaaagatttattaggttcacagtttccgaggttggagttcacactggtgcacatagaaaccatgccagcagcagcctatggagaaggtgttcacttattgcctgatagggaggtgcatggcaggaaaggccgcagacaaaatacacctccagatctgaccctggtgacctacttcttcaagctaggtccgacctcctgaggtttcaagaacctcacaaaaagttgagataaaagtgttcaacacatgagcctttggggaaatttcataactaatccataatgcttgtatactagagaaaattatatctaccccagtttatttcttagcattgcacccagattaaatgagatgctggatccttgcaaactctccaacttattattgaaggagcccagtatagggcacagcagaaagtatccaatcttaacagccagaactaaagctccaccccagccctgacacagttcttcttcttctttttttattaatttactttttacactccgtattccattccctgccccctcatccaccctccaactgctccacatcccacacctcctctccacccccctgtctccagatgtgtgcccccaccccccaccccacctgacctctaaactccctggagcctccagtctcttgagggttaggtgcatcacctctgaatgaacacagacccggaagtcctctactgtatgtgtgttgggggcctcatatcagctggtgtatgctgccttgttggtggtccagtgtttgagagttctcgggggttcagattaattgagactgctggtcctcctacaggatcgcccttcttctcatcttctttcagccttccctaattcaacaacaagggtcagctgtttctgtccattggttgggtgcaaatatctgcatctgactcttttcagctgtttgttgggtctttggaggggagtcatgataggtccctttttgtgagcggtccatagcctgagtaatagtgtcaggccttgggaccttcccttgagctggaccccactttgggcctgtcgctggaccttcttttcctcagactcctctccattatcctgcagttctttcagacaggaacaaattatgggtcagagatgtgactgtgttatggcaaccccatccctcacttgatgctctgtcttcctgctggaggttggctctataagttccctctccttacagtcggacatttcctctaaggtccctccctttgattcctgagagtccctcacctcccaggtatggtggattctggagggtccccacaacctcctatttcctgaggttgactgtttccatgatttctgctgaccctcaggacttcagtccttttccctcacccagtaccagatcaggttccccttccctcaccccaccccaccgtgccccagccactttccctcccaggtccttccctctctgcttgtggttggcttcttctctcttccaagtgggactgaggtgtcctcacttgggcacttcagcttgttgacctttttgagttctgtggactgtatcttgggtattctgtacctttttttgggggggggggggctaacatccacttattagtgagtatataccatgcacatcttttgggtctgagttacttcactcaggaaggtattttcttttttgttttgttttgtttgttttttcaagcaggatttctctatgtagtcctggatgtcctggaactcactctgtagaccaggctggcctcaaactcagaaatctgcctgcctctgcctcctaagtgctgggattaaaggcgtgtaccaccacacttggcaggatgatattttctagttccatccatttgcctgcaaaagtcaggatgtcctctttcttaatagctgagtagtattctattgtataaatgaaccacattttctgtatccattcttctgtcgtggaacctctaggttgtttccagcttctggctatcacaaataaggctgctatgaacataatggaacaggtgcccctgtggcgtggtgaggcatcttttgggtatattctccaagagtggtatagctgggtcttcagataaatctatttccaattttctgaggaaaaattgtttgatttccagagtagttgtaccagtttgcaatcccaccagaaatggaggagtgttcctctttctccacatcctctccaacatgtgttgtcacctgaggttttgatcttagccattgtgattagtgtaaggtggaatctcagagtcgttttgatttgcatttccctgatcactaaggactttgaacatttctttaggtgcttctcagccatttgagattcctcagttgagaattctcggtttagttctgtaccccattttttgattgggttgtttggtttgtttggtgattaatttgttgagttctttataatttggatattagccctctattggatgtggggttaatgaagttttttttttttttttcccaatctgtcttcttgactctgtcctttgccatactgaagctttcaagtttcatgaggttccatttatcaattattgatagtagggcatgagccattggagttctgtttaggtaatttccccctgtgccaatgagttcaaggctttttgccactttctcttctattagattcagtgtatctggttttatgttgaggtccttgatccacttggatttgagctttgtacaaggtgacaaatatggtctattttcattcctacatacagacagccagttagaccagcaccatttattgaagatgctttcttttttccattgtatattttggtgtctttgtcaaagatcaagtgacaaagtttgtgtggtaagtgtgtggttttatttctgggtcttcaattctattccattaatcaatgtgtctgtctctgtaccaataccatgcagattttatcactattgctctatcgtaaagtttgacgtcagggatggtgattcccccagctgttcttttattgtaagaattgttttcgatattctaggtttttttgcctttccagatgaatttgagaattgctattttcatgactttgaagaattgtgttgggattttgatggggattgcattgaatctatagattacctttggtaggatggccatttttactatgctaattctgccaatccatgagcatgggagatctctccattttctgagatcttcttcaatgtctttcttgagagacttgaagttattgttgtacaggactttaacttgtttggttagttacccccaagatattttatattatttatggctattgtgaagggagtttttccctaatttctttctcagcctgtttatcctttgtataaaggaaggctactgatttatttgagttaattttatatccagccactttgctgaagttgtttatcatctggagaagttctctggtagaatttttggagttgctcatgtatactatcatatcatctgcaaatagtgatacctttatttgttctttaccaatttatccccttgatcgctttttgttgtcttattgttctagctaacacttagagtactatattgaataaatatggggagagtgggcatccttgtcatgtccccgatttcagtgggattgcttcaagtatgtctccatttaatttgatattgactgttggtttgcagtaaattgcttttattatgtttaggtattggccttgaatttctgatctctccaatacttttaacgtgaaggggtgttgtattttgtcaaatgctttttctgcatctcgggaaatgatcatgagactttttctttgagtttgtttacatagtgaattacattaatgtattttcatatattaaaccaaccttgcatccctgggataagcctacttgatggtggtgaatgatggttttaatgtgttcttggattcggtttgcaagaattttattgagtatttttgcatcgatattcgtaagcaagattgttctgaagttctcttttttgttgggtcattgtgtggtttaggtatcagagtaattgtggcttcatagaacaagttaggtagtgttccttctgttctattttatggaattgtttgaggaaaatttgtatcaggtcttccttgaaggtctggtagaattctgcactaaatccatctgaccctgggctctttttggttggaaggtttttaatgatttcttctatttccttgtgtgagatgggcctgttttgatttaactttggtatgtggtatttgtctagaaaaccatccatttcatctagattttccagttttgttgcatatagacttttatagtaggatctgatggttttttgaatttcctccatttctgttgtcatgtctcccttttcatttctgattttattaatttggatactgcctcttggcccttcagttagtttggctaggagtttatctatcttgtttatctatcttctctcaaagaagcagcttttggttttgctgattctttgccttgttttctttgtttctgtttggttgatttctgccccgagtttgactatttcctgccttctactcctcttgggtgagtttgcttctttttgttctagagctcttaggtgtgctgttaagttgttaatgtacgatctctacagtttctttaccagggcactaagtgctataacctttcctcttagcactgctttcattgtgtcccataagtttgagtatgatgtgtcaacatttttgttaaattccaggaagtctttaatttctttatgtctttcctgaccaagatgtcattgagtagagaactgttcagtttcaatgtgtatgtgggcttatctgtagtttttgctgttattgaagaccagccttaggccttggtgatctgatagaatgcatgatattatttcaatcttcttgtatctgttgagggttgtttacatggtcagttttggagaaggtaccatgaggtgctgagaaggtgttgtcgtcatagtcgtcgtcgtcgtcttcttcttctccttctccctctccctcttcctcttcctcttcatcttctttcatttttttagggtgaaatgttctgtagatatctgttaaatccatttgattcataatctctcttagtttcactgtgtctctgtttagtttatgtctcaatgacctgtccattggtggctgaaatctcccactattattgtgtggggttcaatgtgagttttgagttttagtaaagcttcttttatgaatttggatactcttgcatttggggcatatatgttcagaattgaggctttctcttggtggaatttccccttgataaacacgaagtatccttcatcatacttgataatttttggttgaaagtctattttattggatattagaatggcaactcctgcttgttttcctggaaccatttgcttggaagacctttttccatccttttactcagagatagtgcttgtctatgtttttgaggtgtgtttcttgtatgcagcaaaatgctggatcttgtttgcatatccagtctgttagcttatgtctttttataggtgagttgagtccattagtattgagagatattaaggagagacgactgttgtttcctgatatgtttgtttttgtaggtggctttatgtgcttgtggctctctgcttttgactttgttgtacaatacttaatatcttgtcctttctttggtacaggtatcttccttgtgttagagttccaggatcctctgtagggctgggttggtagatagatactgtttgaatttggttttgtcctggaatattttggtttttccatctatgttgattgagagttttgctgggtgtagtagccagattaacttttatatggctcctatttgatggcctatgtgttctgcactcacctttgactttgtgtcctcttccttttactatgacaaaagtcatgaccagtttctatattatacccactataagaagttcttagcacttgtagattaatagatgccaactgcctgtgcatgagcactatatacacattgctctttatttcttacctctcttcaggaggattggagagaggcgatacaagttggttgtgacagtggtaaagtttaggtgcaggatgacaccaaagcctgtaaggatattttggctaatggtgatgtttgttgctcttgtttatctctaattatactgacccgtgaaagtatctgttttcctttctcttaacttctcccttttatttcctgagagatggactataaaactgtcaagtagtaattcatgtgggtcaccagattgtggatctgaactgatatattctgatgactctgaggaatttgtctagctgatgggaaactgttcctagcactgccatttagaaagcagggaggcagagtgcagcaaacattgtgtatttctcttttttcctcacgcttctgatcttgacagtacattcgatacacagtacctaggactggcgtttcctttgtgaatagttgctgtgtttgggcagaggaatgggatactcattccatcacaagtttacagcaagctctgtgaaattcatttcaagcataacaaacagtaacctggctggtgtctcatcatcccgatgttgacagcatccacatggggaaagaaatgaaaaactgctgcaggttctgtttttagcagacctgacaccatataatgagaaccacggaggtgacacatttacccaggatccctgtcaggaggcaacagagctggcagatacactcacaaggaggagagaagttttagaaggtgagatggctatggttaaagttagtaaaggaaggctccattgttaaggcactagtgagtcagccgcaagttagaacaactaaactgtgggtgtttctctcgttgacttagatgagggtgctgttgtttattctaggaggcagctggacctaggaagaccaaagccccagtgttccagagctgacagatgttatactgaagaaaataattatattgtcaaattgtaattccagaaattagtagaaagatttaagctttgtaatctgtatgtaattaaaatgtcaagcaaattattaagcatttctagtatgtcaggattttttaaagacatgcatatatttgggtttcagaaagatttttaaatagaacctggcagcttagtgtatggaatgttactgtgtttgcatacagcaaatggataggaacattcaggtagtctgtgcatattctagtagtcatgcaggtcagggcagagggtgtggagactgcagctgagccatgtgctgtacaaagctcttaacggagtgcactgctagtgacaacgtttgaaatcaagtcaactggcataattttgcacattcagaacaacagtgacttgctacattaatttcagctgaagggtttagaagcttttatttgtgtgatacaataatgaagacatgctattgggagtaaaacagctctgtgtcccctctggccactcagtgtctatcctctgtgtcccctctggccactcagtgtctatcctatctctggatctcagctctgcacttcttgaaggttttttttttctttgaaatgatggagtgtgacatgcttggttgtcaacacgcaaattaccatttgactattttcttagaaactctctatctgagactcttccctaggcagatgctcagaaaaagagaaacaaaattgactcagtgataccctttataatatcatttataattaatatataaataataatatgaatgactaacagtaggctagctaaataaaatattctgcactgataatacagaatattcatgtttaaaaataaccttaagaattaaatgcgtatggtattaacagtttttagaagtaggatacaaagttcaatattagctccaggcctgttaagtcatgccaggatgccaggatgccagcacttgtgagacggaggcaggaggattgccaggtttgaaccagcttgagctacataatgagttccagggtagcatgcattatagtgagagacctgtctcaaaagaagggagggagagagggaggagggagggaagaagagaggaaataagttagttgaaaatgtttaccatgccgggtagtggtggcgcatgcctttaatcccagcatttgggaggcgggcaaatttctgagttcgaggccagcctggtctacaaagtgagatccaggacagccagggctacacagagaaaccctgtctcaaaaaaagaaaagaaaagaaaagaaaagaaaagaaaagataagaaaaggaaagaaaagaaaagaaaagaaaagaaaagaaaagaaaggaaaatgtttactatgcttacatgggaaacaggccttgtcttgttgtactgtcaccttcctgtaatgccagctcatggctaaggccagtaaccaccagaagagttggaatgaaaaactgaaaatcaagattgtgtctaaccaagtagtagtttgtattttttttaattaaatggtagaattttattcttggaaaatatgtgtatatgataataacactaataagaatgatactaactagcccatagagatatagaaggattaaacaagatactgtgtatgaaagggcttcataaactgtaacagactccctgagtattagttttctggttcatttactttgatttttattcatatctaaaatgtagaaggataaacattttaagaagttttatcagtagcaagaattcttaagttcaaagaaacaaattgagaacgggttagtcattttcctacattgcggagagattttaatgaagggtaaaatgttgttagactgtaaagtaatgagaaatgctctgtaattggcaggatgtgaacaaaaaatgttgataaggggagagatcatattttcagttaatattggtgttggctgccttttcttgatagggaaacagagactgggtgcttaacagtattattaaatgggcatggtgaaccacagccataatcccaccaagtggaaggtgaggcaggaggatcactgtgagctcaaggccagctggaccatataatgtagtaagtttcaggtcagcctaggctacacagtaagatcctgccttgtaagagaagagaacaaaagaagtaatcttattcatatagtgagccagcctgtgctcagcatgaaaacaattataaataaatgtagagctgtatctctgttgtgtgctctgtgagtcttcagtatattggggattctctggaagatacacattagattggacccgagaacgtggactttactgtcagagcttgattattaatgaacttcattttaaagaaaagatggcttagatgcacactgtgtgtgcatgtgtgtggttatgtattcatgtgtgtgtgtgtgtgtgtgtgtgtgtgtgtgtgtacatacattctcatcttatatcaggctttggcttttgggggtggggtaggggttaggccaaggacccagtttttgctagacaagtgttatatactgagtgatgtctccagcccacatctgttaatctcctttccaggctatatctcctcccacccccacccccagcgaccctgcatcgtgagatctagaatagagaggggaaggaggcagaaatgtctttctggaaaagtggctttgctgaaaagcagcttccatggcctccacagtcggcctagcataccatgtgacacatataccctgaatgcttcctcctttgggagagtttggtagctcacttaggtttataaaagattaatttaggttcagatgagcccatatttcccttaactctcacaccttacatgcatggattccttgttgttggtttttttggtttttttttttttttttttttcagtgaataagctctctgtagcttaggccagaaatagaaacaaggaatctcctttgcctgtcagaggcaaaggagattgttcagataaaattttggagtcttagaacaccacatgtaaaaatctgttgaagaaaagctaggtagagtagcatgctcttccaatcttagcattcaggaaactatagcaggagaatcaggactttgaggctagcctcaactacacaacaagtttgaggccagcccaagctacaggataattgatctcgatcaaaataaaacaaaaacccagagaagagatttaaaatctaatggattagagagatgaaaaatctttaatagagctctctaaaatgaaatattactagattgttttaagtaagtaaaacagtcatcttttcaggttcagataaattcatcaatcttctcttctgtgagatctctctccgtctttagctagcagctcatatttgggtgagctgtcaggcaggtgagaacagacttgtctcccttgatactctggacccctagggattggcagagaactaggacccagtatttatttgagggaagaagacctggaggggattatgtgtctgtaagttcaaggatgctctcccccactcccttccatggagatgttttgactcattctagtcctgagcatgagaagttaagacaaagcgttatgtccctttttatcaaggtcaccttggcagatctgagcagcagtcaccttttagtacagtgtgggctgccaaatggctggacatgccagactttctggtacactcctcatccaatttgactaagtccctcttggtagaagnnnnnnnnnnnnnnnnnnnnnnnnnnnnnnnnnnnnnnnnnnnnnnnnnnnnnnnnnnnnnnnnnnnnnnnnnnnnnnnnnnnggttcttcatccttttcttaggtatcactaaactttgatgtaatttcaattgtataaaatagaaaacttataacttaaggttcaagaaacttttgtttcttccttcagcatcacccttgattgacagtgtccactgtttctgttgtgttgtggcattgatctctcctccagaacatcaagctggctgtggtggttcctacattttgtagaattacagccaagaaactgtagtagctattcatttatattttccttctgttttaaacacagtggttttgttttacatgtacttggggggggggagaagagaagaagagaagaagaaacccctcctgcaaaagataggtaaaaggactggaaagatggcttatcagttaagagtgttagtggacttgagtttagttcccagcacccatgtggagcagctcacaactgcctataacttcagctctgtagaatttaacactctcttctgacctccacgggcattgatacacacacacacacacacacacacacacacacacacacacaccacaaaaatcaacaactccaaaacccaaaatgtctctttaaagaggttataagccacttaaagtcttcaatctagttttgttcctggaacgttctctttcctgttcatcctgttccttttgctactaaccatatataccctcagctcagcttacagtcttacagtctgccaggatgactgatggttgcacagtatacctggcattgcttgcattggggattggttctaacgctttgtcttaattgggctcccagaatcacgcgggaatatgcatgctcagatgctaaagaaagcctgcctctagttgactttgggaagtaaagttgccagcggccagtggctgggcaagatgaaaggggcgggacttttagattgcacacataaggagagaaagaggagaagaggagaagcaccatgactcagagggagaagggtcagacttaagagctacaggagagaagccatccaggtggaaagggaatgtggatgggggagggggcgggggaaggaggctccccagaaggtaatggggtagcagagatgattgagagtttagaaggtattaagccaggagtactggagggaaatgtatgctagccatggggaggattagaaatgcccagccattgacctagacaaggcatatcaaaattaagccagcatatgtgtgtccttcattctcaaatccagagggctctggtgggtggtaggaggtgtgacccgccaggagcataaagcagtttaacaaattcactgctacatgcttgtactcggggaactgccagaaattgagtaatggtcttctggttgctcccatcaaccctccagaatagtaaaggctatctgtcccctttcccattttctcctctagtctttcatcccagacactcatagtccctagaaagttctccgttctctttcaactccagacttgctcatctcagcatggtacattccatccctctttctttctttgcttgtagtaaatccacccttctgtcttttaacagacaccacagactttagcgatgtcctcctaatacagatgaaatcacatctgtaaagtgagacttttaaagcagtcttactctgaagggcagtctaacaacacagattagggaaaatgtaagctagggttttttgttttgttttgtttgttttgtttttgtttttttgtaagctaggtttttggaaagaaaaggaatgatagttaaactttatggaagctttgaatgtgctaattgctttgttttagactgtgttgaatggaactcaatattaaaatatccaacttacaatatttgaatgaacagaattctgccctctacctatctcagcaagctattctccatcctttgcatttagttaccgtagatcccagtagatacaggaactgaaatataccattttcttctcttgcttgactcattttacataaatagcaaattccccatgacctagtctggtaaaatagaaaatgcattattatattttgagtacaagctttaaaagtagtgagggtattctttggccactggcctggttataacatagtctgggaactggatataccatatcgggaatatgatatgggaactggatataccatatcgggaagaggagagaggaccaggaacagagggttgagaggtgaattttcaagtcactgatctcaaaatcatcccatagttaataaaagacactagctgcatctgaagcttaaacttaacataatccagtgataatttaagagagttgtattcagctattatagattcaaaagtgtatcaatactatattttctgataaataatactttgggggtgaaatgctaatgtgataattccagatcaaataccctatattctgatactcctctatagtgttcaataggaaaattcaagaacaatcagagcttggaaaaaattattcacttacaaaatgttttattatgtcatgataatatttaaattagtatacagcccttgggtgtatgtgcgaacatgtgtgtgtgtgtgtgtgtgtgtgtgtgtgtgtacatgtgtacataacgtacacctggtgatcattaacctatgaacagaaatagaagaaaaggcacgaggagcaagtaatctattaaataaaattctgagtatatgagagaaggggttacaagtgtacatcgagctgattgatgtcactattgccttaagtaagccaatttaatcaaataatggagagagttcatttttcatgagctgtgtcttgtggttgaacttgaacttgaaaaaggtgacactgttgtggcatataggatagactggaatggaaagagttcttgcttacagaagcccgctggagtgttggtgaggttctgagctactggagactacctggggaagagagaataatacaagaagtgtcatgcagatgggatactgcctgaatataatcttggacctccaaaaataaggacttagaggtggctctcagaccacagcttagccatttgggaaaatatcattacaaattgcatgggagaatttggaagaaggaaagggaagattaaatgatgtaattataattcccaaaaatatttcttaaaagaatataccctaaatgaaaatgtaaaatgataaacttagagaagaaaaccttgtgagtagcaggatggctgttggtagtgacacaggcctggaatcccagcagttgggatgcagtgggcagaaagagctcaagttcgcggctggctttggtggcataacaaattggaggtctttagtctcccacagcagctcatgtttattagttcattttaaaaatactgtaatacttgtttttaactgctaagacagcatgctcgagtgtttgttcttcatcctctcctggctatcttacccctgaagagcaggggggtctttaaaggactcttcaaactcatctgcttagtctgggacgtggatcttcataaaggtatcccagcaaacttgaaccgagagcatgactcaagtagaatttggcttctgttgcttctcctttacagcatttgttagctcttttcgagtatctctctcatacctgagctcaaaccaggtatttagtaaaataaaaagaagtgtaagcatattccttatttgcaagagatttttatcctttcaagatatgccttaatagatgatagggcatattgaatatgctatagccctttaaacagaataacgaagatacttaatgaacacaaataataaagtctgggaaagaaatgagagtgtagtgttgctgagatagaaccggaggagacaaatgctagtgtgctagcacatgtgtctcatgtaatcaccacctgagaaaggagccatctttgaaacgagtgatggcttcatagacagaatgaggtttgagtaagacttagaagaactttgaataagaagagaggtaagaatcctgctcaatttagaatggagtcatgttttctcaagaaggtaattatttaattacagatagtcttcagtggcacctattaaagagcccgagataatacagctgcaacaagcctgcagccacacagtgctaggagcactcttagcaagttgttccttccatggagcccacacttcattctctctcctctgatgtgtgtgtgtgtctgtgtgtgtgtgtgtctgtgtgtgtgtgtgtctgtgtgtgtgtctgtgtgtgtgtctgtgtgtgtgtgtgtctgtgtgtgtgtgtgtgtgtgtgtgtgtgtgtgtgtgtgtgtgtgttacagatgaagggcccatctcagtgtcagtgagtagcactcacctaggttttgtttggggaaaatcagaaacaggtgtttcccttctgacatggaaacccccattgagtaacggcaggtggcacttttgacaagtatatccagatctaggtaacgcctaagctggtgggaagaattggggaatttccttttctgaatttgaaagataagtctgctctataaactttctttcctaactggttcttactgagtacattaaactttttggagatgactccataaagatacatcttctttaatgcagtttgcatagtacatagtaaggtgcttagccatacagcaaaggccaatgtgctaaaaacaactataaagtcagtaataaaatataagatcctaattttatgcctataagttcaagggagcctttatgattaagatagcttttaaaatactgttatgaataaatgtcatttttctcactcttacttctgaagtggtgctacttagctaatactgtctagcctccatgttaccatgtgaggaatttccacacaatatttttttgcttgattttaagacaatatcttactgtgtagccagtctagctttgaacttgcaactctcctgcctcagcctcctgatgggatcgtgggtatgcactatcacacgtagctatccttttggttttgacatgtacatctttgtaaaccgctctgattcagctttgtggtatttgttcacctccagcatatttctgctgtctccgtcacctccatcaatgacactggcatcccctctcattcctcagttctagttcctagtatttctcaccgttgacatatacttctatcccaatttgtggtgtgaagggagaggcattatatctatcattcatcctgtagtctccctcagatacttacccattgactgttctatagatagtcttggattgattatccaaagatttttttttttttactagttcctgcctttgttgctagattgtaattaaccctatcaccataccacataaacacacttctcagcctctttggtatgtacttttttacatgctaaccaaagatagttaagggtattggttagatgttctgacatgtttcctagtggtgcgtagtagaagtgtctggatccaccctgcagagctggctgaggtaggtacaggtaggaagagccttgcatatgcctttacttcacacagtagacctgcttcgaagaaagatcattctccattccagtcacaaatcgtaggacccatgtgtcatcatatctaatgatccagaaattacactcacagtgaatgataattggtcagagcttaagttcccatttaagaatggggaaagggagtttagctgtttgtctttgaaaaagtataatatgaaaaataaatcttgaacatttataccctttttcctccctaaattattattctctaccttgtgctttccctttgagggcaccaaaagcagaaggagtcatgccactgaagaagacatcctcttgatctatccccatcccttagtaccatcagaccctcatgtggtatataaccattctcagggtcgcttcactgcccgtaccttgctgtgcctaagcttttctttgggtgttttagtaaataccagttggggtgatgccactcaaatgtattgttttaatagaagagctcacacaaggccctcagtcttcttccatctccagactgcagtatacatgtgacatggagcctgaatgctttatgtttgacttacacagtgatagggttgattgtttctgaatacatacagataagtgccacctctccattagattccacttgaaacattttcttttgtatcaatttctttttgtctttccctgtagacatccatgtttaccattctttatgtctagactactctgaatgtcagcttaaagcagaaaattcgaaggtagaataaagagctgctttgagaactttacaaagaagcagtttacattgaacaaaaatattatttgtagaataaggaaatgtctagaatattataattttgagccagtatcatctatctaactgttcttcctatttcattattgccagcatgaattgtgccttatagcaagataaataagaggttagaagccagaattagggaaccgtgtctgggtttagagtaccaaaggccaatagtaggccattcccatcaagccaaaataaacacaaggcagaagtcgagagaagttacaggtcagagcaagatatgcaacctagggagcattagggacatcaagggctcaaggaagcagggaaatctggaaccctggcctccaggactgagagatccgtgggtgttagagatgaggtcacattgtaagaaaggaagcaagaagggtgcattgtggagactcggtgtccttaggagataatggattagtggaggtcagtacaagacactgcacagcagacaggacttggacacagattaaccccctttgcttttcttaggatttttatttaactaatagactctctttttttttttttaagagcatcactggagttatagaaccaagcagtcagtgcagagttcacatttcctacactcaaacactagttcccctgtttttaaggagatcattgagagagcataacagtatatgagctattgctactaacacttatttccacttggacttattctgctgtgtgttttgatatgtgtgatggattttatgttctctaaaattcacccctttaacattctaagtctactgtttggtggaattaagtatgttcacattgtgcagttgtcaccaccaaggctgggactttttttagcatcccaaacagaaatctgatacgggttaaatagtaattcttcacctcctcctcctcattggcttccatgaactacttcctgcctggatgcatttgactgtctgtgtgtgtatacaagggcatgctccacactggcttgaatgttttgtccaccacctatatcacaagttcgtgcattaataaggccaggtagtttttcagtttgcatcacattttttcaagcattcatctggtgcatctttgagtttctacttttcaattatcatgtgaatcattcactcgtgactattgggctatatctgtctgagttcatccttcaattcttctgtgtatgtgtccagactagaattgttgagtaagatagctttgacaactgcattatgtatagcatcataaagaatgtttccactctctttaaaactcactcgacctgtttctctttctctcatatactcctctgcttagctttaagtatatatatatataatagatatctattttatatccctctaacccaaaacttccaggtagagttgagttagtcagcccagtggtcaagtgagtcagaaagttattataaattactgctagtcctcagggccttgagattttgaaagttacatacacagttactacaggtaactacacatttagaaagaatgagtttcaagtaaaatgttttgcaggcttaaagtgtggtatattccttttcatccacatgtttttttaagcacctgtgctattgccaaggcctaacctagataactacataggaattaaagaatccactcaagtgagttttaggagtttctaccgtttctgtcacctaagtactttagatggttgttcctttgagtcatgggtttcaaaagatcctgcttacccttgcaaagcttcttccaaatactgaactaccatgaataactgacatcctgcttgtctaaagatgaatattttccttggaacatgactctccagtgaggctgcttgtgtgactgttgctgtgtccagtcctgtcatcacagccgtgccagaccctttggctgttctacacacttgttctacatggttgcagtttctctctcctcttgggtgtgctgaccagctcttgcccacttcgttgtctttatagtagagcactgcactaggaaggaagataaggaacactcgtcctgcgtcttgggaattttggcctttagagcaggggtctccatgcttttttcattgttcactgcatattaattgcattttgttggtttgtctgtatatatgctgtaagtaatttcagcatttacattggtaatgaaaccttttttctttcctagataaaagttaattataaaaagtagtcatatggttttgtgtatattctaaggtgtatgcaacgtactttaaatacctctgctgggaaagttaacattatttttcctgagtgaaatctagagatggtcctaggaattccagggatgagtagatttagttaaggaattgctctagtatctgttcctccatcttcccaattcatttgctacccaagcacaaaagtcctatgtgtgttgggaatcgaaatagtatattctgaaaataggggtttttaaagaacatttggtagatttttatttttacaagatgaaaagtcctagagaaatgtttttataataatgtgaatgtatttaataccaattgtgtcagctttctgatttaataacccagtatcggagacaatcaacctttgataagtttattttagttcttggtttcagaggcctcagtccatggtcacttgacactttctattgttgcaggattttccctgtccaatcacattaggacagtggggggcctgtgattggacaggaaaagggaggcggagctaggagttggggagacagagaggtcgcagaagacagaggtcgaaggaggaggaggagaagccaacatggaggcagatagtcaggaagaagatcccgatcccatgtggttttaaacagcaactagtagctaagattttcacaaggttagaataattggggtaaaacttttatcattatcaattggctctgaaattattgtattggcatcttgtaaattgtgatcttattgttatataaatctacttggataattaagctttaagagtgatgtttctactggataattaggtgttgagatggcttttcatagggtgtgtggggtgttgcatggaagtgtgaggaacttgtgggggacatcttagagatggcccagtgggaaccctgtggccctgtggggcgaagagttgactgccaagagactgagcaagtgagatcacctgacatgggggttagccctagagagttggtagcggcaggcaggagcatagcctggcctggctgagaattggcgtgttcattttataatatttccctcaacaatctattgctttgggccaaatggtaacacagtatactatgactgaaacacatagaaggaggcgaatttaccttatggcagccagggggcaaagagatagatgggaatgggctcagatcccctttaagggtactctcctagcccccagatgacagatttggggctagatttcctccactagattccacattagaaacattagacctcactgcagcatcacacactaggcaagcttttgcattattggcctgtgagggacacttagaattggaactgtagcactaatgaatgaaggctaagatggattgctggtggctctcctgtcttgctgccagcctgctgccctgtctagtgtagggagtacacttttctttctgttgcaaaaacaataagggcatcaagatgataaattttatgttatgtggaatttttttcttctaacataaagacaatcagatcttacttactcattgcctgtaactaatttattttaaaacctgagccacataaccagactgtcactgtctgtgatcctgtgtaaagattccatgtcgtacctgtccttctaattttctactgctttgctaagtcctttaggcactttagtctgttacaccgccacaaccagagaatggagttttgatttgtaatacaaaccaagtaaaacctatgactagcagtctctggagctccttcagtggtacagacttgaagaggggcctttaatgatgccctgcctgccatgttgctgtctgggatccaggaaggcaggtagacagcagtctgaattgcatttggtatttcctgtgttccaatgcctggatgtaaatgagagatgagcatttcaatttggatgatctggctgggttcctaagccgaatggctgcgcatataccataaacaccgtgaagaagcaaccatggaaacacttgttttcttgttgagctaaatttactctgggttgaatattaacacagctcctggcaggactttaaaagcaaaaatagcttaagcgtgattcactctgagtcactgctggtgctgagctgcctggtgcttgacattgaacaagttggcagcctgcattgctacattttttctaggaactctgaacacatttcattcttgtgaatttgcttgtgcaatgatattaaatagagtaatatgtttactttgtttctaagtcaaatgaatttgagaatggcgaaactaaagtatttttcttgggctttctggaaaagcaagcttctcagaattctgtggtttctttaacagtttattttataggagattagtaaaatatggaaattttagattagatactggggcttctggaagttttgttaaaaagtctagtagtactattaagcaggattcattaatcttctgtccttaccagacaaggtgattgtgccattcacaaagctnnnnnnnnnnnnnnnnnnnnacaaggtgattgtgccattcacaaagctctttccttttctttcttaccaggggagggagggagggaggcaggcggtactgcagcctgctgtacactcagctgggcggttaacttaggaaatacttttcttatttgagattatataatgggaagttcatgggttttgaaaggcagaccagacccacccaggggatctctgttggctctttaaaggcctccctcacatgcctttccctgagtcaacccaagtggctgctaaatcgtgagtagcctgttggctgactgtgggaaaacctaggacagagcaactcgcctcatccatgatcagctagggctgagtctagaacgctatatgagaatggttttcccttgatgttgcaatttctattttaacatgtttttgtttagcttttggagttgcccaacagtgtaatttcaattgaggtttagtttcagctcttccaattttttttttctaatttaaagacactatcattttgtcttagaacttcaatgacttatataaaaaatggttttcctatgatagtcttaaaaccaaaaggagcctagcctaatttttgatagtattttgaaattattttaccataaaattgtacattagaagatgcaactctggtagagaatttcaacatagttgcataaattgtgtttcatattacaacttgttctctgcttgacttcactgaaattaataaaagaaccctttcagaaggatctggtgagttagctttggttttttttttttttttaaagaacttactcatagtgtatcctgtgttgctaagttttcaaagttacccatttcaaccacacccaaaccctttcagaggcttgaaatctctttactcagatgtcttcccagtaaagattggggatctctgtgagttccaggagatgcgtgaggactgtgtaagagctaatgcttggtgatggagctgctgctgagtcttggatacaacacacagttccttattctgcagtcagagatcccttacagctttctgactccggccttgtggctgctgggaatatccctgaggtgttttgtctcaaaaggatccatgccttggagctagagaagggagaatgggtttttaccatagcattctcctggcccacggttgtgcatattctgctgatagctgtgttttggaggcaggtgaatttttggcatgtccttaaagtaagtactacagggtttaggtaaatcagccctttcagattgtaaactaaaaggttattagcctagctgagtctcagcataacccgatagtactctgttactgcagatcagacacacccctgtccctctgcccccaagtacccaccgcgtgtgtgtgtgtgtgtgtgtgtgtgtgtgtgtgtgtgtgtgtgtgtgtgtgtgtgtgtgtgtggtgtagaaaaggtcttaggtgtaagagttcaggcaagatccctataagaaagaacttgtatactcattaaatctgggttttacagactgggtaactgttaaatttatttggtcagtgcagtttcatttttctgcttctgttcatttgtgtagtagccatttattgaaccttactatgccagaaattaggatattttttaaaagtcggtgcattaacttagaggcagtcaagcaaattattaaattatctatgttttaaagggccggtgacaaccatgtcataattttgttctagtaactattttcaaatgtttctaattttcaaaaaaaaatatgcaggcatatagtaactttttggataggattttagattctacaatgtgggatgactaagtcaatctaattgacatgcttagcacttcatctactttctaatggtgaaaacatccaaaatctacttataaacttggattatgcgtccttatcccattctgccatcactcttggacaatgcacacacttttggtaaattgtagtcttgactaccttgaagtcagcttttttagatcttacacagaagtgaatctgctctctttatctttcagtactgatttaaatgtcctccaggctcatccatgttgctgcaaatgacagacctttctctctctctctctctctnnnnnnnnnnnnnnnnnnnncccctctctccccctctccctctccctctccctctccgtgtgtgtgtgtgtgtgtgtgtgtgtgtgtgtgtgtgtgtgtgtgtgacacagagagatagagagagcgcacatctattggaagatatgctggctatgcagatagtgttgtattggacctgggagaacagctgaccttgatttttatacacagaggtgagattgctggatcatatatggtagttctacctttgggcctgttttatttttaggaagctccatactagcttctgtaatgactgtacaagttctcactcctatgaacagtgtgcaagagtatcctttgccccacatgctcacgaatactggctactttttccctttgataatgactcctttaagtggagcaaggtgatatcctcttgtgatttgcatttgcatttctgtcgtggtattttcatatatttcttgctcattcctgtatcttatgagaaacactggtttgagtcttttgtctatttgttattgaaggtaaaaaccttcattataaatgattcaattggtgaagtgtatttgcaccatttttttctatgtgttactggtgtttggcctacatgtgtttgtgtactactggagtgtctgatatacacaaagttcagaggagagcttctccagaagagctggagtctttgaaactggagatacagatggttgtgagctgccatgtaggttcaagaaatcaaacgtgggtcctctggaagaacagctaacgctctttaccattgagccatctctgctggcccatgtttacatagttaatgctaaaatgctatgactagggacacacagacgtcactcctaccccagcccttactgactaccaccccaaccccattataaaaagtaattatttttaatattgaaattactttaaaagtactttttaacatatactattgttcagcttaatgagttttcttgttcttcttccaggcaaagggcatagccatttacctttcttatacccagtcccttctactgtctagccttcctctagcccccttttttcttagtttcccttgtaagtctctcttttccttctgtaactctagtgatcactgtaccatcatacaagattgaattcctggttttcataagtgagtcataaggtggtatttgtctttctgtgtccttgtttcattcagcctactaaagatctacccacattgtgcaaatgacagggttttatttgtttcacagttaggaattattccactgttgtttcctggtactaagaagtgaacccagggctttacccatgcattgtaagtgttctccactgagctatgccctcagcctcccttttacaattttattttatttttcattctactaacttacttaattacttacagacagggtctctctacatgattcctggctgtcctggaattcacaatgtatgtagaccaggctggtcttgaactcacagagttctgcctgcctctccctccctggtgctgggattaaagggaagtaaaacagagtagctccatccagagaggtagtgtggttcacctcacaggcagcatgtctttagcaggctgtatctgttgatcctgtggtgagtctgagaatttgatattcttacattttttcctccaaacctgaagtcaggctttattacacattgggctttgtcacttgaagaggctcagaggccagtttcaggaagcaaattagccaaaagaaaggtttgcttccatgaacagcaatggtcttctgtccactgtttcattattttaagttctctaagaacttctttccgtcctgagcctctcacctccatcccagccactctggtagtgagcaccactgaccagctattgagagtcttccttagcctggctcactgtcagctgtcaggattcccagagctacagaagaggggagaagggaagtcagtgctgagaagaaggacaaggcatcccctagggcagtccatccccagcaacatgttactgggtcacctttcagagtatgtttgttttatttagcaagggattcacttatcatttctcagtttgatttccaagaaaaattttacgtggtagcaagttaaacttatttactgagcaaaactgtctccaaagacattttcttttctctctcggggagtgtagtagagtttttgacagttgtagacagatcatcatagtgcttggtgtggtgtaaaataacacactttacctgaaggcgtttccagatcattactaggctttttatttttcaagtaataattttcaaaagatgagttttgatagacttttaattaactgtggttttggtgttgtctctatatagcatgccccagtgtatttgggctccattcagtttttatgtctacaaataaatgaatataattcagaatccagaattttgtcctgggtttttttcttggcatgttaagttgacctgctagaaactgagctactgcactctggagacagcatgttcctgcccaaaggcctcctgtgaagagagctcagactttgtggtccagttgttctgtgcatttactttcaaatatacccaggcctggagctttaaaagaactttttcaggaaaggaaggtccttggctgtggagagagcgtgtaactaaaggtggagacacagtggcagagcacagaaggccggagtgccgcaggtgctttcctgcactgtgtccccctgcctccagatagatagcccaggtcagctgagatctcagtgtgggagcttgagaggccaggctgggctttgaagaccgcccttgcttcacacttagtgcggtgtcaagcaaagactgtgttcatccagaggctgggagtacatttttaaaatgaagaaggtggggagaagctgggagagaaatggggaagcagggattggggagtgagtttggaagagaggaaggaggaatttcttcctccttgacagtctgactgttgtttgttctctcttagcttcttcctctcttcactgctctcaggcctgttcgctcctccctcatctctgtttccttcctaaccctatcctcgcctctgtgagcacttcctttaatgaccgcactccatctacagaggactatatcagagagtgccacgcacagccatgttctgtagaggatggagtaactgaggatacaacagcctaacatgacttttaagttcccttcaagttagagtgagcccctctgatttgacaagtccattcttaaaatgaggtgagggtgggggattagtctagagatctgagtcacaaactggaagcagtctccagatatgtgagaaaagacctgccaggtcattgccagggtggtagaggggcttttgctttgctttgctttgctttgctttgctttgctttgctttgctttgctttgctttgctttgcttcgcttcgcttcgcttcgcttcgcttcgcttcgcttcgcttcgcttttggtgttttgagatagggttttgatatccatcctaggctgcccttaaattcacaacaattctctgcttccccatagtgccaagatgactggtgtgtaacaggtacctccatgtctgctgtggtagacatttgatagaagggtatttgtgttgcttcctcagacaatagtgagtgtggacatgttccccagtctctaggcacggaacctgtcactcagagaggtgacagtcacacagcaggtagaagaggcacagagctagattccagcagctcacccagtccagagccgccaggttacccacagacatctgttcacaccactttctccttagaactggggccacttagattagtgtccttgtctgtgccgcagcttagctcctcacctcagttcagatatttcaccatgtcaacacagttgcactatgagtaatgttaagactctagaagcctctgctttgctaccaaacccttggatgctttcaaatccagttaagctttaatcagatctttcttgaattacttttgtggctataagatgtctattataaaaaattccatttaagaaaacaaaaagatgcttataatccccttacttaaaaatagcaatgttaacttgtatatttccttagtctgtttctgggaagtgtgtatttggaaagttggtatcagcatagtgtcttgttcgtttggtggtcatttatggtaacaattggtgtcatcagattctttaagttattttgatagttttagaacaatatcttgttttatgcattaagtcttaagtatcaaacattacaaaattttagataatttctttattgtcttatacattgttaaaattaaataaaatcaataatatttttagatttttttctaaaaattacttcaaagcttgacataagtgattggtactttacattggtaaaattttattccttttggaagtttttttatcaaacatttgtatactcaaacagttgatatttatgatatcctttcagtgcaattactgagaataaaactaagggaaactcctaccttggcaatgcttacagttcagtgcaggtaatgtgtaacaggtactgaagtaaggcagcaagcactgtactaagaagacacaaagggtacatgatggagttttgagcaaagaatgaagggaagacttcctagcatgacatatgatctgggcctcaaacctggataggattgcatgggagaaagctagaaagggcacctgaggctaaagaaatggtgtatatagtcagccaaagagagctgagagcatctgttatctttgtcagtcatggggcacatctgagggaacaacaggccagttgtggcaggtgacctccagcatgattaccaatcagtgtgtacctggctccatgctaaactccttctcttatagaacctttgaggtcacctaacagtcttttgagctgttcacatttccacaagcaggagactgaagctcaggagactaagtcacaagctcatgtgaggcaggaccaaaactcaagctagatctgaagcccatgcttgctttgctcccacatttctgttccttgacgaatgctattctttaactagttagagccccatatcttgctctgcacgaaagtcaactgcagatggatcaaatctgttaatatacaaatgctaagactgttagaggggaaagtagggaaaacacttgaagatgcaggaatgagcaaggactttctgaaataaagccagcaatggaaagtaaaaagtttctccacagcaaaagacacagttgatcaagagacatcctacggaatgggaggaaacttttgttagctatccaccttatagaagattaaaacctagaatatttcaaaagctaaaaaaaaaaaaaaaaaaaaaaaaacccaaaaaactaacaggaaaccaagcagccaatcaacaaacgggctaatgaaattaacaaacagctctcaaaagaggaaatacaaatgtccactaaacatgaaaaggggagaagaagtctacttcactggctaccagagaaatgtacatcaaaactgcattgagattccatctttcccagtcagaatggtaatcattaggaaaacaattaacaaatgctggcagagggacaaaggggacccttagtcgctgcaggtaggaatgtggacttgtccagccactggagaagtgagtatggcggtttctcaacactaaccgtcatcctatggttcagctatatcacccagcatggttactcaaaggctcctactttttccaaaatcagacctgcttttgatcagataaaagaagcacattttgatcatttggtgctggattacagctcagtgacagacacttatctagcatgggttgggttcagttcccaacactgtgaggtgtgggtgtgtggagagggaaggagagagaatagttgaatagtttaacctctttcctaatgaatttccttgtgtatgcattctaccaatagtgagaattagaatgtggagagggtctgacaggagggaaagaatgaaaacaagtcagctttggtttgaagcagtctgtgtttgaggcccctatagaagtgcttctctttgaagatgtgtcatacaaagctaggggtgctgggaggatttcagggtgccagtggccccaaactagataaagtagagcatctccccagactactccagcgttttctctctagttctactttctctgtctgggcacttatggtttaaaaagcctggatcaaaaaaatcaggagcctcctttctgttatagttagttatatattttaagttgctgaagcattctattgcttgattatccttggtgatctaaattaaaataggttggtgtgtaagctcagtggaagaccacttgctttatagcacatgtatgcctctaggtctgattccacatgaaaacctggcgatgctagaaactacttcagttacctgttcagactcttataacagtgttatcaactccaaatgtagctttcaggcagagttatctaagtatcagaatgtcttttggtgggtgtgggtgtgggcgtgcacgtgtgtgtgcgatgtgtgatgtgtgtatgttttgttttttgaaacagcgaagctgacctccttccacctctcaagtgctgggattccaagcacagctcagaatatcttcgtacttttcagaaactttctcaaaaatgtgattctcctttcctcccggccagccctcccctaacaagtccttctagttttatgaggctccttaattctataaagacagaaatcctgacatctctttttcctctctctcccttctctctctctttcttactgttggtttcccttcccttgcctgccttccatccttcctcctttccctccctccctctccctcgccctatctctctctctccctctctctctctttctccccctctctctttctccctttctctccctctctttctttctccctttctctctctccctctctctctttctccctttctttctctctctctttctctttttctctctctttctttctctctcctctctctcccccctccttccttcctctctctctctctctctctctctctctctctctctctctctctctctctctttctttctttctttctttctttcatcagaatctcatcgtgtagcccagactggccacaacttcaaaagcatcctgccctagcctccagagcacaggacagatgtctgccaccactttggcccaaagagtaccattttctaaattgcagccagttaaatcttctgtcatagaaagtcaagtcttgtttccccttgggtaactgtggataagaacaactatggctcttctagctcataaaaatctaaacaactgtcttgcttttgcctgtttttttgtccttatatgaatattgaatgacgaataatgtgactattctaaactgctcattaacacttttttctttattttgtattaaacaatgaagaaaagacaaagaaatggccagtctagatcaaattcataaattaaatctcagtgcagtagggcaaaatgatctgaaacgagtacctaaaactaaagacattccaccagtgggagaagaggcagaacaaaatcaaggcctatgtctgctggatcttaccagccatctttcttagggagttgagagcagcaagtatggttattaattctagtagaggaatccacatttactaactggtcactgagcctatacatagtaggtcaacatatctggatcagcagcaaaattatgagactttgaaatagaggattaagcattgaataaaatcatgatttaaagtggtggttgattacaaattataacatcttagagtttcagatgtagttcattggaggctctggactccatagcacagaaaaaaattacaacatctgattttgcatttaatatgcactgtcctggccattaactttttaaggtattattttatagcatctttgcgaaggtagatgtatagaactgttccatagaataaacctgttgtctcagggaagaggcatgggtcataggatatgttagggaaagataccatttatgttctataggcaggcattggtgatctgatcctgaggtcccaagccacatggtaaagatttggcagaggaatgatagcctacatcatccatattgctgttgtgtggtttgaccagcacagaacaaaactgcgttttaggagcagttattaatgtatgtgagactttgttgtagctcttctccttcagtgttggcaagctgtcagagaccagctgcttattcacagcctgccctccccacctagatcagaaaccatgttccctttgtgttgctgcagggcttccatcaagttcctcgttgcttgtttgtaccctgagtctaaacccactcacagctaatgagtgtaagaagctgtggccagcattttgttacaggagaaaggacaagctgcactctagccaaacccagtgctgtgttgtgcatcagtgtggtctcataaagctccagcttgcttctctgtagcgtagctctcacctctcacgatgggattaccaactgtgcctatgcctctgccctgctgtccactgctgacaaaaggagccacatttccctctatttcttaacacctaggactgaccttctggcataaagaaggtgttgagtaagtgccagagaaataaatgaatgcactgaactgtgtgtttcttctttacaaatcagaatgttacccatttccccccctcagtttgatcatgaagatcagttgagctaatggatatgaaagtgccgtgtttaaacatagcacctggtaggattattgtctgctataaagtttgttattgtcaagcaagtaagagtcacaaactcttgacagctcaatgttttgattacacatttaggtcagtactgttaatagccttgtgatgttccttattaggtacaaagtttagcatgtgcccatttttattatggaggatttcagacacaaccaaggcacagtagccttgtgtcctttatctccactgtcagcagttcacaattcatagacagtcttcatcatctgcaccgcacacatcttcttttgctacacagaagtgtgtgttcccgctgctctgctttaaagtattctgtgtagaaatattcttaacattctttaaagaaagcagtcttgggctggtgaaatggctcatagggaaaggcacttgctgccaagcctgacagccttggttttgaactccaggactcatctgatggaaggaaagaactgattcctacaagttgtcctcagatctcttcacatgcactgtggtgcctgtgcacaatggtacccacgtccttcccttctccctaccacccttccacacacacacaaataagtgtaatacaatttccagagtttattgatagtcgagactgaaagactaactcgaaggtacatgagattctctcatgatggtgaccagctacattgcagaaagcctttccagagttgtaactaattctggagtctaagtggtatcacttgctgtccctgtgatcttctaggagaataggaccttacagaaaagtacagagcctgcagtgtggtgctcacttctatgtcatagttcttgagctttttgatatctggaattctttaccactttaatggcctctgcctgtatttctgagaagttagattttctcattttctatacaaactactcctaagcattcctgttatatcctgttactcccttgtatcatctctagtttcctttagctggttataaaactctaatttagaaggattcacattttatattgtgactgttaaatcctcttcatcatgatttttatacaaattggagttagcatgaaccagatgggtttgtttagtattgattggttgattgattgattgattgattgattgaggtactgggaatgctttgggaatgctttgtagcttttcaggttccatttccatttcctctctaatgtctgctccttgcctcctgtcttctcagttcatctctgctagtcacacagctgcatagttctactttccctcaaaagctttccccaataatttctattttctggtccatttttattgtagacagttcccctttgagataagttattaatttgcttttttttacatatagaagtaatatactttaggagtgatgtttcaagtctcactatgtaactcaggcagtcctagaactcactgtgtagaccaggctggcctcgaactcagaaccgcctgcctcagcctcccaagtgctgggattaaaggtatgcactactgcacttgccaatatacattttaaccagatattatacagaatatttcaaactggaatttcccaaatccagttcataaatgtggcgactgctgtgtgctctcaccgtcatttctgagtatgaacaggaatatgcacaggcatgtctacatacatacatggtagaaaaatggatgggtgcacagacagactgctattttatatatacacaccatttcacagccttcccttgtcacttgacaatgtgttggaaatttgtgtcaaagaatttaaattttatctttttattacctcagactcctcatgttttctatgtatgtgcagagaagtcgattgaaactcttccaggaaaggactaattggacactccttctccttgctttctttgtttttattgcatattcactatttgtactgtggaaaatcaaactgcttatctctcccaactccttaggagctataatcacatggataagaatctccattattccatagttctgacaggaagttcaaagaagtaacagttctttcctggagattccaaatatagggtatttgagcaaccatcttactgaaagcattgaaattattaaatgtatgtttatggaaacaccctcaacaagtaagcactctcatctcctcatctgcctgccatccccagcttctccctgctcagtcatagagcaaagatgtcttgctattagaatcaaatcacaatcccacccttattttgggaaagtaagatttttttctaaaagaaagagagcacgcagaagaataaagctgctttctccctaaggacacgcaggcagatgttgacttcctgggcctggggatgataagactgcacagaaagctggcagaagatcaccataaaattcaggtcaggcatgtagggtgttagaagcaaagactcgtgagtgctggaattttctatttattcacctggtagtagctatataaataatttaagctaaataaatatttctgaatgcttttctgtatatatttactatctttattataattaacaatatataattcaatgtaaaagttagcaaaaatatggatataatgtgagctattttatgttttatataaatgataagtttatgtttctgtaagtaggaatgtagtatatgaaaactgtgcatgtatataagtatatacatttttgtttatgtttacataaaaataagtttatgctacatgtacatagaaaaatacctagaactaatgaactactaatggaagctattcttgaaactatagtggagaaagaaagacttctttttggtattatgctttaaatagtcatgaatgtttactactttttagaatctagttttaaaaaaattagatcttctatctctacccctacatagaaagtattccctccccggctatgtaacacagtactttttttctttctctcttcctcttccttccttttcctttcttttcttttcctttcttttcttttcttttcttttcttttcttttcttttcttttcttttcttttctttcttccttccttccttccttccttccttccttccttcctttctctctctctctctctctctctctctctctctttctttctttctttctttctttctttctttcttttctttctccctttctcttaaataactatgcttctttgttagactctaggcccttcaaaggactgagccaatgacatgtttatctctgtatttcttgtattcgataattcctagtacatgatagaagaactgtaaatactagtgaaacaggaacaaatgaatgaatgaacctgaagaggaacaaagacacccacacataagcattctcttagaacactttgagatgttacattgctttggcacagcagtggtaataaaactgacacagtaaatattgtttgtttgggatttaaccagcactttgtggaactgtaggcaatgcaaagtccaccatgtggttaaccctctttctcccagaatacagcgaactgaaagtatgcactggaaatgattgaactgagaagtgaatacctaatagattacagagagattatatggtctgggcttggtagttgttttttgctgttgcttatatatgtggtgcaggcactttgccatgcaaccatatcatcagctgtgcactgaagtgatcttaagagacattgtgtcactgtaagtaggaaaatttgactatactctaaatgaagatgttaacatgtgaaacagacacatgtacgctcagtcacatgtatgtagagtgttcatcagaagagagcttactatctccaaactagaacaaagaaaggctattaattgaagaattcttaacagcatggccagaccatcagcacctgccaggttgagggaagcattcggttggctgggccagtgcgcagccccgtttcccagaacctcgtgcatacatgcactgtaattcctcgtgattcattgcacttgctttgcttctgtgcacttctgtgcaccttgctctggctatttgccttcccaggaagctagctcccacagctgatacagatgtgccccattcttctattgttcactaccgattaataaagccaccttctttactcttctgatgcatcggtgtctttgtgagttttgttagagtaattctgcattcctgggtccagtcagtaatatggcaaacagaatctgcgaggctctttgaggcaaacatttccttgtaggaatctcttggtacataatctctatcccgtcaccactgtcgtgagcaatgactctcttctatccaacactttatcagaataattcttcccaaacacaacatgttaagaacgtcttagttgtgctgtggtgacacccatctgtagtcccagcacttggcatcaacccttgatgggcccaggcaagaagataagcctgggaaagttaacagggttctttcagaatgacagcaacataagtagtgtgtacatttgagttattactaagtcgttgtcttggtgacagtagctcttctgggtgagtattattcagtttgtaaattccacacctgtgtgcatgggtcatctattgtaggtgccatcttatgaagaccttcagtgatttattccagttctgatctcaccatttccctggctctcatttcattgtcaacactgaccctggtgttatggtcaagtcacttcctaacctcgtctctcttgcagtagtgaaacccaaagaagatggaagacacagtgaattcgacccgaataaggattccagtagagcaggcaataaacgaggttatagattttttttctttcactctcatctgtctctctttcctcagaacagcaccaacagaatttaaaagggattaagttctctgtgtccttctagatgaagataaagcacaaggtctctataacttgctcagcgtatctttgagtacagtggaacttgagccagattttgacagatctttaacaacaatttcttgccaaaacggcacgagtatagacaacagggggaaagccagagtcttgtggctcttagaaatggttgtcgtgtgtagtaactgttattgcctaggatgttaagtgtcattgtcctcctccgtattccctctccccatagtacccaactgaaatgactcatcattaaatctcaccataagttggtcagaagcacacctaggtcaggcagggctcagctcacaccttccagatgtgcgtgagagtgagggttacccaggcagggcttggctcacaccttccagatgtgcgtgagagtgagggttacccaggaagtgagactggaagcactgcaggtaggacaggtaaatgcagtcttagaatttactttgtaagaagtaaattcttcaaaacatacttgtttcttacagtcacagtggtattgatacagttggagccctgtaacaaaataaaccccgcagagctgttagtggctgtaagaagctgctgaggcgtctctccatccccatgattaactacaaagctgttctaggggactgatggaattgctaccagatagttatggaccagtctcgattacttagatgataatgagctactctaggccctttgaccaaattcctcattttgtggcttcctgcttctgttggataaagaatgaaactgaggagaagggtctagtttggattctttgtagcagagtttgcttcacagcaggacatctgaactgttgaggacaccaggccaggtggcatgcatacactccaggtcagtctgtcagcaccactcagagcggtcagtgcattactttacagtacagccttcagcaccattaaaagcaaactaggcaatgaattatgttatgtgatagtaggagaaatgttcctgttgtttgaaaaggaaaattatggccctttaagtaaacgagaaaatgaatacactgtttacatgcataagactcttgaaactacctggattttttttagaacttgaattccttctttttgttaaggtgcatacaaatgatccagatcctacaaataggaaagtacctaagctgtgccataggagaagaccaaggagtagaaagagacaaaggtcaaccaagaggtcacatagatgtgatacatgcatgtcaccacatgccactctggtctctgctccttccatcctatataggggcccaggcaactatttaccttgtcctgtgtctctttccttctgttgaagattagggtctgaagagggattccctaaacttaggacagctcaagtgtggaacaggactgttctgaagctgggcagcattaggacacatgaaaaacaatttcagaatggcagtgctatctttagactgacatcctatttcctgactcccacctggcatgcacagcttcaccaggacctctatggtgccagagtaggcagagggtgtctcagctcatctgggtttctgaattcttttttggcatctgtttttcctcagtctcccacagctttctatctcctctgattcctgctcccttttggtagaggttttacttgtaaagtcattaagcaaacccctatgtgtttgcttatgtcgcttatatatattatagttaatgtataatatacttggatatctccacttttaaccaaatacctcctagcaggagcatgttaaactttaggataagcaatttttgacagtctgaaaatgattctttttaaaaatgtatgtacacaaaatgttgagtaaagtgagccttgcataccacttgtttcaacaaacacttgttgtgctacagagttagactccgtacttgatgtttatgctggtgaacaatcaataccatctctgtccttgagactagtagcagtgcagttctggcttctgtagtaagcagcttaacggtcaaatagtattattcattagaagatggacccagtcaggttccccgggtgtaggaaagagctccaccagcttccaatgctcctctgagattttcgggtgttcctgtagtggagaagcagagtgtctggtgagagatgttactgacaagagtgtatccctctataaacactgcactggagaagactttgcaacctactgctatagatgatggttgccagaaggtggatgaggttgcccaggaaatgcaactataatgtgaatacaatgggaaagtagaatgagagagcagggtgtgagaacctagcctggcaaactcacaaaaatagaagaagaagcagtgggggagccaagaaagtgtaaagaatgtaaatcgtgttgtgagctggagactagaacctaacatgagagaggccaatgaggctgtgacaatcaggagtgactagactcctgatgcaggagtgtccaggtgaatttattaggccaaagtccctaccactgctggaaagtgggggtcctgcaaatgcccttctttacaaagcatggctttgactagaacctttacaaggtaaactgaggacttccagtctgtgtgcactgctactccctgaccttacagtagaagcagactcaaggcactgatgaattgctctgcaatcctgtaggcagagtgtgtgtgtgtgtgtgtgtgtgtgtgtgtgtgtgtgtgtgtgtggtgctctaaagccagaagcttttgcaagtcacacagacactaaagaagagattcccccacgttttatataatgtgcgctcatgaagtggctaagagcttatatgtccaactcttggcaatgtcaggccaccctcaggaggtcactgctgactgactatatttgggacacagtgcacacagagagaagaggtctttacgccacactcagttgtttttgtttttccaagatatgatgaaaaccccacactttttcttaatcttaacattcttgcatgtggacatcaggtgagcaagtgtttctagtttaggtgaaagggtggaatctgactagaacaaaatggcttactatcaattgtgtgagaggacttaagaacagcaggaagaacagagcctgtagcgtccctgaatcttcagaagggttatgtatagctacctctaagtatacagtgagctctagtttaatagagttattagtacacaaaaagaaaacagtgatgaaaggtccgctcttacacatatttctaattaaaatgttccattttagagatgaagaaatgataagcatgcaggcctgtgggagtggaatggggcaaagggaagggggaatgagtatctggaaagagagtaatagaaggctattactcactctttacagccagctgagacagctctgccttatagggaaacaaaagatcatctgactttgagagccacacagaggtatctcacttacagtggaccagcactttaaaagatgtattagggtttaaggggataccaaccgtgaagccattttgtagccaatcaaataattagaataatggactccatgtaagtgtcagagaactgtgcatatcagctgttaacatagcagcaagcagtgatgctcctggcagattgtctcagacagagcaggtaacagggatctgtctgtcgtcccagcgttttggtcaacaggacgaagacagaaaactgcatgggactcctcagtgctcttgtcgcactggcaggaatcaataggaacttgacagaggaagatgtgacgttcatccccagaaacttgtcccttttagaaaaagagacaagaaaatattttaatatttttctaattactctgaaaaaaaaaaaggagcagggaagagaagccatttataagcatgaaaaacagaatgtagtttaaaattaaaaccagccatcctcatcaccacctgtagctatcctgctctgttaaaagaccaggatgcaaagctccttctagccaaccatagctaatccaaaggcacttaaaaaaaaaaaaaggacagcactagaaatatgtcacaggcaacaacagatggtgaaagttggggtatattgttagagaatttaaagcaaaatataaggctaattttttttttaactcgtgagaattgtgaatgtttgccaagtggcaatcgtgaaacttgtttttcatcaaaatgtgtttcagaagtagcagaattggcaaaaccacagtgatgttgcaacttagaactcattcctttcagagctaatggacatccacaaatgtaaagattcaccacgcttaattagctatatgctattatgctaataatgctttgtagcctacagaaactcaccaagtcagcacactggaatcattctatattacaaagaaaattttaggggcatttaaaacattgaaactgtacttaacaaattatctgaccataatgcagaaaaatccactctgtgtcaaatatcaaccaaagttagagtcacttgattgagatatatatatgtgtgtgtgtgtgtgtgtgtgtgtgtataatgtatatgtatatatatatatatatatatataaaataactcaagttgaagatacattgaaaatgtagttaaaactaattttaaaatgtacatgatttatcaaaatacatagatatgacaaggtttactaaaaccatttcataaaaggaagtaattccttcattaagataaagagaaaattgcgagttaagcaatgcgaagcaaaaccggaagtaaagggacagggaactagaaaagcagtggtcctagctgacttaggagaacaggcaggcaggagacagagaagactctagggtaaactccagaacaagaaaggagataaaagaaactatggaaagaggtaaaagttagacaattataggtgtggcagaagttttaaagcatacatttgaaaggccagcctagatagagcccagtgtaagctattgcctagagcatgtgaggccaagggttggacccccccaacatcagaaagaaaaatttggtgtacttctgtacatttttaaaaataatcaagtcataatttaaatcttcaaaataaccaaaaataatcttaaaaccaaaaaaatcacttaaaatacctgtgaatggtgtattgatgagagtagagtttagaagggctggagagaaggttcagtggttaggagcactggctgctcttccaggggacccagcccccacatgaagttcacaaccgtctgtgactgcagtcagaggagacaaaaccagagtcacattgctctagtacattcaaattggttttgtttgtttgtttcttttctcaaaagttaaaaactggcttttaaactagatattttgaaaccttcatttgaacttagtcacaagcagtgatagaaggtagggaaccctaagcattagcagcaccttgagagaatccaccccagaaacagtccctgagagtccaggcaggggtttattgttcattactcattacagagcccctgctgtgataatctccatgtcaccagtggagagtttgaaaggggccccttgtgtgctgtgtgagtctacattaggactctaggtgtctagagagccagctctctgtgaacccttacttcttaagggagaatgataataaagaagcgggcagccgtgtaatgagcctgtctgagatctttgtgtgtgatagatttccaagtcctcggagaaatgatggctcactcaataaaaatacttggtcagtgttttgataaaaatttgttaagccacaaaacataaaacagtatatacagtcaaatctagttttcacaaagtactttattatgtgctgtagaggaaatctacaagagtatatgcagctattaaaaatagttttatttgaccttagcactacagtgatttgaaattgtgcttatatgtatatatgcaatgtttctatagttaaaatacatgtccattaaagcaataagatccctccacaagcagtaggcatgttcatagcacccatacctattgagaagttaaatggggaggggagggaaggggaggggaggcttggggggtgggaaatccgaataaacaaacagaactgaattagcaaagtgaacatacgacataaggtgcctaagaatgaaccaaagaaatatgttacctcttttcagaaagtggatttcaaaaattttaagtataggaagggagtatacacttaatgggaaattttctcatgggtcatgctgtgatttttctttcctttttaagtgggaaagacttgtatgtgggtagctacgtatatgttgatgtcttcctccaatgaaagttagtggaatcaagtgcctgtatagatggagaatttgaaaggtgaatatattagtgttggcagatccagctgaagttcttgctcagaagaggctctcataaaacttgtgcctattaaattagtgcctaatatgttttagggaacatgctagccatttttcttgattaactgatctaaagtttataacagtctgcaagctcacaatccccctcccccgttttttttaaatatttatttatttaaataagtacaccgtagctgtcttcagccacaccagaagagggtatcagatcccatggcagatggttgtggttgctaggaattgaactcaggacctctggaagaacagccagtgctcttacctgctgagccgtctctccagccccggtcacaagctctttattcagttcacttttttaatattgagcctggttgggaccttgttttttgttatggttgggttttgggggtggatttggtggtttgttttgttttgttttgttttgacatagaatctccatataacatgagctggctaccagcccatgagcctcccagatgctgaggtcaccagcgtgggccatcacatcttcttgaaagtgtggttttgtaagcagtgtgcaatcagttgtccaagggagctagatttcagaggttcaggattgcagcttaacccttaagccgtaacttcatcttaggtctctctgcactccaatgccaccagaagacatggagcccaggaagagagagcttatggttagtcctcccagtgttctacatttaagagttgacacagtgttgctttgagaccgggatgggtctgaggaaagaagccagtgtttaaagacatactgaaggaagcctgtggagacaggtaaagccttagcaggaagaaggcagaccaacagtatggacacttgcttacaggaggctggggaggaagctgaagtatttccctggaaagggaaggagaaaggagaaaaagggaacaagcaggttaaccacacacgtgttgtgttatctgcttagagttgtataccttgcaggctgtagatggctcagtagctaagagcacaaactgttcttgcagaggacctgagtttgggttcccaggacatatttgggtggcacaaccacctgtaactacagattcagggagacctaatgccgctaccttctaagtgcatacagtatttaattaaaaatatacttggaaaaataagacgtgtatacttcctgatatctgatatctctaatcttggtctttttatgttgaattagtgatagcatttgtcatcttagttgtgcataaaataacaggccgtttaatttgacatttgatggtttaaaatcattgtgtgcatattcatttctaaattaccttattaatgtgagcttttatctaatttttgtaatccatttgagcagtacatagaataaaatggtaggcatgccaggtgttatggaatctggggagtactcaagtaccacacatacacaaagatctggtagagattaaatgaaataatgtctatagatataaagtccttaaggctgtgattatagataagttatcagtgatgcctattctgtatggacatttcagatgggaaagaactcccctcccccatgctactgctctttgtgtgttgttgttgttgttgttgttgttgtgttgtgttgtgttgtgttttgaaaaagtagttcttgctgtgtagtacctggcctggtacttgctcagtaacccagattggctttggtgcctggcctacatttctcttttagtaaatatagatttcacaaatgcagtaggtaagtatgatggaaactcacttttgtttgtataggctgcatgttacctgatcttgaaatatactgaactgtcattatgttatagacaatttaaatgtagaagcagattctgaactccacatactcaaacaaagccttgcacacactagatccacagtgtgctctgtaaaggaagggtgtgttcgtttgttctttcttcctctctttctgtcttcttttttttcttctttttgctctcagcaaaaatgatacaatctttatggatagggtttgggaaattcctgcagtatctctcaaatagactgggagtctttgtttcttcactttctacttttaatctactcaggggattttgtaagttgcttcagttgggcgatgggcaacaaacagtagcttgggaaatgcaggtcagaaactgtagataaaaatcctccttggtgtgcaagctcctatgacttatctctactgtggaatcgctgaattagtagtgtacctttcctctagaaagtatcaggtaatacaggcagtctgtttgtaagataactattaattctatttcctaactgtctcaccatgcaagaagagacccagaaaaagaagaaagttttctttgggggaactgattttgctttgtcttggtaaaatgttccctatactcatttagttggctgttactgacgagttttcttcttggagtcagagttgcaatggcctctgtgattgtctggtatctgagaacctcctcagaaagcctagaagaaagtaaatgctttctgccttgatgtgtgtttctcacaacaacggccaggcgacacccagaattccccttcatctcagcatgtaggcactgccctttaggggcagaaacaggaggatccaaagcttaagaccagcctgggctataggctgaagttccatctcagtgaaaccaggaaactctttcatcttacagttgatctggtcatttgatccttctggatatctggttacttttactttgacattaatatttacacgcaatagttcaaactctgatgcctctgctgctggcatctctgttttcctcctttgaggatgtctgaaaacagtgtcttatgtatcccttcagagtaagtgcaatggctgtatgatgtctccacacaccattggaatcatcagtgtgctatggaacatttccccaaaacacgactcctcatcatgtaactgaatcacaaggatggctgtaaatgggacccagtttgtacacgtgaaccattcccccccacccccccttacaagaaagaaactcaaaacatgattttcagattctgaagttcaggtagttgtgactggctgaaggaaggtcagcagtacatcctgtatttcctatgtgtagcaaaccctgagccactgccgtccgtgtatgatgagaaccaccttctccagtctccatgctacattctttcatctatgcgcctcagctgcttttggtaaaaataaataaataaataaataaataaataaataaataaataaataaatatcatttaattagcttgtggattttgccatttgaaaggtgtcttatgcctttaatcccagtactcggaaagcagaggcaggcagatttctgagttcgaggtcagcctggtctacaaagtgagttccaggacagccagagatacacagagaaaccctgtctcgaaaaaccaaaagaaaggaaggaaggaaggaaggaaggaaggaaggaaggaaggaaggaaggaaggaaggaaaagaaagaaagaaagaaagaaagaaagaaagaaagaaagaaagaaagaaagaaagaaagaaagaaagaaagaaaggtgtcttataagattttaaagcctgattcctgttgcgccttgtgcctattactaattgatgtggctagaataagctccattgatgctgactaatgctgggaagctctttgggggcaattcagtttggtaatgactccattcatgcatcagacccatgctatgtcagctgagtcctagaagagctcacagcctcaaggtagaacatgtggggcttttcaaaacaaacccgctccccatccagaatctgccatttcatcttgactcttggctctgtgactccaccagtagaacatgacagaagtgacgacatgtgacattgctgggcccagacttgaagaaactgtcagcttctgctcttgtttcatggagtcctcattcctagcacccagctgccatgctgtggtgaggtctgagctaaccttcctttcttcattcttgaggaagatgacaactgaatggttaattgggtgggagaaaagggtggagtctgctcagcagcagtgaggcacaaaacagggtgccatgcagaggagttaggagcattcaggtatccctggagtaacaagccatactgaagatgcagccagacaaaggttgaatcaaggagaccttgtctgccaagggaaggcaatgttgtgggcagtttggggttttactgtattattgttgaaacagcagagcaatgtgataaatacagtgtttgtcttacacagatgttctgtcagcagtaagcaaggtggatttgagggagttaaaactaaatctgggcttggtggcctacgtctataatcccagcacttgggagactatggctagcaggattgttataaattccagaccagtgtgaggtctcaagaaagcacacagaccaactggaagcattaggccggttctgatgattctcccttaagttgtccaggcaaaggcaagggcctgaaccaagacttcaatgaatatagagaagaaaaagttgatttaaaaagtatctaatgggtttcttgttgtttcattagagaggttcttatttgtttggctttgtaagttagtccctggtaactgattggaagccagattctgctgccgctaaaaatggagctaacgttcgttcagctgtaccatgctggactgaaatccatggcatctctctggtggtgtcagtgaggcagttagaaatgtaagtcacaagctaaaggggacttatgctgcaaatagatttggtggtcaaagtcatagtcgtgctagttgatatccgtagcaaattaactcatattcagtgaagagatacaaggatggaactgtgcagccaccctgaccttgagaagatggttcacaggaaacaagcccaccaaagagatggggcagaatgaagttcaggagactgggctgggagtgggggcttgtctcccggaccaatgaggacaggcaaaaggccattctggggctgttattcaggctgggcaaaggaggagcaaggggcaaggataaaagcaagggctgccagagaaactaaagaacacatgccacgagacggggaggagagagagttggcaaacaggtaaatacttagatcagccaaggagcttatgccattcaagaagaagtcattgaaagaaaatatactgaaatgaaaaaagaaatgaaggaacctcctgctgaaagtagaagggcagagaatcgggggctccttggaggttaggaggctatattaaggactggtatagatttaaacagttttagaatgtggcaggaaattgaagatcgtggttgttggatttaattgttgtctatgaaacaggacacaaattgtctactgagagaaaagaataaagtaggactttgtagttgggttgaagaaagaggtgcctttaaaaatagtcctttaaggaagtagaaatgagtgctccctcataatatgcaagaaagaaggcagtaggttacccagaagaccttgttgatgttgaaggttcagttctgtaccagcccccccccccacccccgagtagtgtgctgcctaaatgctcctcttcaagcaacacaacccacttcttcccttgctggcctcagtgtggagaaaatgggtcattctcagaagtaatgaggcagagcttatataacaacagagttttgtttaaaacaatgtgtgcatagtgaaactgaaagataactaattgtatttgtttttaaagtaacacaagggctagagagatgtctcactggccaagagcactggctattcttccagttgaaccaagcactcatatggtggatcacaaccacccatgactccattctaggaacccagtgccctgtcctagtctccacagtcaccgggcatacaagtgggatacatgacacacatgcagcagagtacccattcatatcatttttttttttaaagagagcaatgccatgaagattccaatagacaagagaagaaaattcaagaaggtagtcaaggatgagagaacccacagaaaaacaaatggaaagagtgaggaaaggggaggggcaggaaggggtgaggtttcacgtagaaaagatgtgactggaggagatagcctgaaatttcttaggcataacacactgtagtgtactgagcatgcattggtccccagtttgtttctggccggttcatggaaggtcacagaatagaatagtcccagtaagggatctgctgatggaccgggattgcccacatgtacaagaatgcttggttgggtctccccaaagaactttggagcagctgcaccctactttgctagcctcctgttcctgcagctcccacacgtataacagtaatagtcctgaaaggaatagctcacattgtatgtgtgttgtacctctgaaagaaggtcaggccagatgatgatagaccatttatagaccaggaagtgcagtgtgagcctgggggtttcaggttacacaccttgtaaatggataagttacaagtagaactgaggtcttctagtaccagtgttcttcacataagccaggctgcaatttggagttacagtatggattttggacttagctagctatgggtttttagcccaagctatcactggcacatttcagcagctcaggaaatagatatgccaggtaacctctgagagatcctgtactgtgaactaggaaaagctctgtgacaactaactggggctttgcttctgaatttgtgagataggaagagtatccatcctgtccttaaggttagaaggtacttgtaatcatgaagttactccggcacctgtcagttctttaagacttgctgtactgtgtatactgtgtcttcattcagttccaagtactgttatccataaactttgctcaatacatgttccaagtaggttcattgctatcttagaggccagagtcagtgttaaagccagagttggagtccatctgctgctcccctcaggttgagttctaggtcaaggaatccagatgatgtccctgtggtgaatcagtgtagcaggagggagtggcccttagtgagttaacctgggagaggctggtacctcagtcaccagtgtcagccctttatgacaatgtgtttttcagaatggacccagatgataaagatgaagtcatagcactctaccaagacagcagctaactgaagggtgactgcactgtagggcaggctttggttcacaggttaaacgtaactgcgcttctccagttctggggttttctttgcttgctgcatgttgaactttgggcatgaccatcttctgttatgagagcttgaatctagccagtccttttgctatatcacagtttagttccaagaattccctgctgcccgtgtatttccaggcagaaccagacattagacagagccagatatgttgattgaagcatacagagaagagtgtccagtgactttgaagttatgtttatgtttcagtgggctcgggttgggggggtgggggagactgaccaggtacttacagacactgacttagtacttacgtatttttgtccagagcctgtcacccaacattgatagtcactcttgtgtggctacagtatatagcaagctcatgccagcaagccccatctttgttcatctgggacaagaaatgagagggtggccaattcaggttagaaatactaaagctctggttggtgttctctcaaggaactacagtcgcatactcaagtctggtccagagtcagtatcataaagactgtgctgtttatcaacgcatctgggtagacctttcttgctgttttctgtttctgtgtacaactgttactatgctcggggctttggggtggtactagggattgaacccaggacctggcaggtgctgggcaagcactttactacttagtacattccagcctgactagcccttcagtgtcggcagctagatgcgctccctgcagattagcagatttagtagtaaccctggcattagtatcttgaatcctagaaatttaaataatgtatttacacttagggattattttttgtttttgttttccttgtctgagccattaaatgttttcaacagaactaatatttaatccttaagatttcataaccgagaagtttaaaggttaactgtaacaggagaaaacatctagtgaagttttaaaggtaaccagataaggaagtacagaaagagtgtagaaacattgacaagctcacaaagccaattttgtccagttttctgaaaactccagtctgtacggctcaagcacgtgagtcatgccttccctttttcttgtcagtcactcattcacccgcttgtattacccatgattcattgttccctctgccaagtattgctctaggtactaggtaacaacagtaaataagacagtcagagcgtactgtgtgccagttctgtgccaggcacttgggaacttggaactagctgctttcggctccacaatctgacgtaacgagggaagtcagttttccccagacctcaccgactagctatgtggcttgaggggggacagggtcagttccctcctctctgaaatgctcttgctcactgttcacttagaagccttgatgtaagtatcagatgagatagtcattttgaaagagctttggaaagcattgggccttgcttgtatagagaccaccagtaatcttgtaactgaccagagttcgggtcatttcattgcctctgtgaaaagcgtaaagggcgtgtgcccattgtacattgaaatgtataactgccacttcctgcccatggggtggggatttcagaatgagttatgaggaataatagctgcagccaggaagactcacacaggaaacataatgcagttcatacatggtatgtgttaggtataaagtgctcagatgcaggggcagagaaaagataagacgggagttggcctctgacctcaagaaacatagacatgtatatgaaaattcagagtgcccaaatataaaccctgagcttaattatagtttcccagggattacagctattcatttgccccctaaacgtttctaaaagtgttctgatagccatcagggtgcctgctgggatgtggtgataagatgttgcttccagtttcatattttattatctctcatgtccactgtactaatattttagactgaggtaagaaatgtggtctgtatagagagagatttcattcagaaggttgattcccaggaccctcatcaaagagccagcagactcacgcagagtttggtttgtaagtgttcctccctaacattaaatcccatcatgtagagactcgagaatctccgtcacagctgagagtgatgtcacagcataatcctagcactcaggagtccaaagcaggaagatcaaagaaaacctcaacctgaccagcatggtggtccatacctttaaccccagcatcagggaggcagaggcaggcagatctctatatgagttccaggacagcaaggactacacagagagaccctgactcaaaggagaaaaatgcaaaaaaaaaaaaataataataatttattttaattaaaaaaaaaaacaaccacaaaccagcaataataatcacttttaaataccagttctcttcagtgcttggagcaccactcaactcctggattgaatgagtaaaagcatcaatagcttgatgagagttctgtctgtgccctgtgccaaaggtatctagtgcttgcttgcctctcagactaacacacaaatacagctattgctgtgatggaggccaaggtcagagctttgcagaccctccctggagtaagccctaaaagcaactgaagagcttgttcccagaaagtctgagacatagcccacagcaacctgtcacaatagggggcttctttttttcacctacacatttttttattaaatattttttattattttcttcatttacatttcacctaagcatttctttttgtttatttgttatctctttcctgttcttgtcaaaagataatccctgaaagagtagataccttgtggcgcttctgtagggtccgctatgtgagaacgcggtccggcacagagcagcctgctcaagaagctgctgcagagccagttaagatttccagagggtcgtgtgcaaacgagcacagggcagtagagaaaaatagggcagtgtgctagttactttccagagctctgtcagggcgttatttcaccttaagtctttcctctcagctagtaagaggatactgccagttaaaactggggttgcctcttccagtgtcttgcttgacacatgtagatgggccatttcatcttcccaactgccctgagatcatggcatttttgttactgtgttttgttttcattgttactgtttgtagaaatgagaaatctcaggcccataacagagttggaattagagtgaggcactcccttcaggtgcagaatttaagggccaaaggctgtgccaaaagttcaataatcaaggcaaacaatattgtatgcatcgaagatttcagttctgacaagatctgacagtatctggattaaggtgagggaaagtgcatagtcagagcctgaagtttattacaaatgatgctattcatcatagatacttgagttttagattattgcattaaatcattactcaccctgattagttcaggttgtgttactttgttttgcatactctttgatttttgcttctaaggccagtgcttccctcaggtcaccctggtgccacactgccttggagactgagtggcccagtcatatggcctaaagtagcaaagcctgcatttgactacagatcacatggccttctcatcatttcatttagaatgcctgattgtcttggttgtttcaattctcttaggcttttcagccccattatttaaaaatatccttaactcctttgacctttatgtattttttgttctgtgaatttatatcatgtgccctctgctttcacgtcttttgatttgtgatttgtgagtgtttccgccaagggcacattacaagacatccgctttgagcagaacaagattttgtggcctgacttaggaaatctgatgtggtgtgtgcctgtgagaccagcacttgggagattgtgagcccagcctaggctacatcaaagccaatcactcaaaccaagcagaaaggagcccgctctaaatgagctgtggaaggcgagggaggtatgatctcttaatcgctaagacactgtagggcagaagggcagctgaattcaggggtccgttttataaagtcaggtgggaacagtgcgtgcttggaatctcaactccctgggagggaatagaggatcccaaggtcaaaaaccaaaaccaacgtaaaccttgaaactataaggtagagatttctacagaccattcttttaatgaggtgtttgtttgtttgtttgtttgttcttggggaaggggctccttgagagagggcctcattctgtaggccacgctgtccttgaacttgatatcctcttgttttagcctcctgaatattgtgatttgggattacccatgtgagctttttcttgaataataaaagtagccaaacccattagcatcgttgttatctgttttagttttttttggttttctcgagacaaggtttctctgtatagctctggttatcctatagaccaggctggcctcgaactcagaaatccacctgcctctgcctcccaagtgctgggattaaaggcgtgcgccaccactgcccggctgcatcgttgttatttgtatggaggaaatacatctgagtgcgtgaagatgctgatctcctgttatagtcttgttatttaaagtgtgtattggttagtcctgcagtacattggaaaggatagacaactttccggatgatcattttctttacatttgcctgggaatttcaggtctagtatatctgttgggcaaatactggaagtccaagattagaaatagaaggtaagggctggagagatggctcagtggttaagagcactgactgctcttccgaaggtcctgagttcaaatcccagcaaccacatggtgactcataaccatccataacaagatctgactccctcttctggagtgtctgaagacagctacagtgtagttatgtataataataaataaatctttaaaaaaaagtaacaagaaatagaaggtaagaacgggagtaaattgttttcctttacaattaaatcttcgtagaggtaaatgaaattgaaggcaaaggaacatgattttggaatgctgcagtatctcttgtgaaagagtttcagcctccctgagaatagcacagaataaaaactgactcacagctactggtgttgaacactcggtttgagcatccaacatagaaggaagaggagcctcattcccacacatgcattttcccattttactgcactgagaccacaggacttttatttttgtagccttcttagaggaactgggaggatggagcctaggggtttaggccacactgctgaggagctgagcacagggctggagaagttagtgcttgtcttacgggtcacacgaactatagaagctcttcatctgaatggatgaatggttctgcaaaagtttaatgcagagaagaaaccaaaggccagaaggccacttggttgcatgtatacttttttgtataccagctaacatttggttggtgagtttagaaaggaaaagaatgtcatttcctctgctgtaagataaatgacagagaaattagcataagcccccattagtctgctaatagggaagtagaagtggacttctgtgctccatcaagagtggcctagaaaatggtgaatccattaacaaaaaatataggaaacagtttggaaactaaagggaaaggtagcctttccaagtgtgttctctttgaagcagtggtgtatacagagtgaaagtactgcttagctcattggagatgcagaggaacagaaaggctggatgtacgtacacaccgccattgactgggaagagagacaagatcctaaagtagtctgtggtggagaaggaaggtgccagagcctagtgctggaggcatgagaggaagcagtgtcagcaggcccagcctgcagacccagtgtgcctgaagctcacagcttaggagcaatcccaggagtgggcttgaactcaggaaataacagcacaggtccatacaggaggaagctaaaataaaaaaaggttctttcccttgtgtgataaaggttgtttgtttgtttttctggacacttagtggacatttaatgatctcatgttttgtcaacttgattaaggtggtggtgtatgcctatgagaccagcactgactttctttttgattggcagagattgaaatacattttaatgtatttctatgccttacaattctctctttttttctttttcgcgcataactgtatcattgtcactgctcacagtagactcactagtatccactaggcttcaaggagctgagccatgtgtggctgattgattttatgtgtttagtagcatcctagaacaaggaagtgtaatatactgtacctttcctttttcgcttcatctgtggcacaaacaacatggtagtgtaaaatgacacccttctgccttcagaggtgggcaccacggaggcagctccaagtgtgaggaacttagctctctgtgcatgagttccatgtgacttcctgggcctgtcatggcttgggcgcagagatgttttttacagcagtgtttctgacagatgggaacatgcagcgaccacagctccctgaaagatcaccatgtctcttctgctttcagcacttgcaccctgacaagagttcttgaaatccgatagaattcagaagcttataaggtgaactctagtgacttgggtctataacaagagcagctcggctcacttgaatctcaataacaagacattgaaagcagtcattgtcatctataagaaaacccaagagccgtctccaggctgagagtataacaagagtaagttagggtaacatgttgccttgtcctctggtagggtttactcattcactcattcattcattcattcattcactcactcactgtttactgtgtacaggcatactttatgccagactgtcactgttgctgcctcacgattccctaacttatacatatctcacacagcaaaactcagcacagggtggtgaacacattggctacaaatgaagggagctgtggagaggaaagggatgactagagggccagatgtgttttcaaacaataaaggaggcatgtaggagctgaggggataagtccaactgtgaagaactgaggtccatcagcataaaaaagctggatgtggtgactcagtgaccagacagcctttgcctagtctgtgagctccaggccagtaaaaaaaaaaatcctgtctcaaaaaaacaaggtatacagtacagcatcaaagaaccaatatctgggactgacctatggcagcttcttcatacacacacacacacacacacacacacacacacacacacacaaacttgcacatatactcagaaaaaatatgaagttgagacagtcagtatacaatataggcagaagaattaacaaaatccttatagggctcactaaggaatctgaattttatcctgagccttattcatgaacctggagccagcaggccctggttttctggcttagccctccacagtgctacagctacagtagacacctggcttttctatagattttgggatccaaacactcttaaccactgagctatctccagcccagttgaattgtcctgaatagaaacaagtcatggtcggcattgtgtcatgatctgggaaggatgaagaagagatttaggggagagctaaactagaatcagaaaaagaaggaagctctaagtggaagtgtttattatccatctggacatagagaagaagaatggaacttgaaagaatgacttgaacttgaaagctgcttaggaattaggtaacaagtgcaatggaagggttaaggtcaaggataacttagggccaaaggtaagtttctagcctaaattcctaggcgttgggggtacctgtggctggtgccagccttgggctctctaaggtgaagaattgcaacagaggagtaatcaaaggttgattcagtcattaacaggaaccctcactgttcatctctgagacctttggaacggtactgcataggtatgaatcaggtttcactagtcaggccctaagtccccacctcagggttctgcagcatgcgtgcttgcatttattacagttagatacccttttgatattggctttcgaacctgctctttaatagctctataatcatatgtatgttttgtgtttcatcttgataaatgattacatccctagaactttatatcttcaaagatctcgaagtaattgatccatataacatccctgggagttagtaggtggggattcttgcccttttttttttttaagttgggaaaaacccagagatactcagtcacttgctccaggcaatatggcctttacatcaacagtctgcttttaaatctgtagttttctttatctaatcaaactcaaactagagctttatcacccgtcttagcttactataccacgttttccatttgacttccttataaatctcagtagtaatcttgtcgtgggtgagcaagctagcagatgacaaagccctgcagatggtggggtgttattagacgcgttctcacgaccggccaggaagaacaccacagaccagaatcttctgcggcaaagctttattgcttacatcttcaggagccagagtgcaagaagcaagagagagcgagaagcaagagagcaagaagcaagagagagagaaaagcaagagagagagaaaacgaaaccccgtccctcttaaggagcattctccttcgccccggacgtgtcactccctgattggctgcagcccatcggccgagttgacgtcacggggaaggcagagcacaagtagtcataagatacccttggcacatgcgcagattatttgtttaccacttagaacacagctgtcggcgccatcttgtaacggcgaatgtgggggcggctcccaacatcggggaagggacagagattcagccacatctccatcctagtgtagatattcaaggggagagtgctcatcttccagtgaagatgtgacatcatttcaactcacagaccagctactcacttaccgcagtcgcctttgatattctgaggggactttagcacttcatgcagcaaccataagcagtcatgggagttgccataaatgtgtgtgcatgtgtatgtttttgtttgtatatatgtaaatgcatataagaagactgtgcagaggagtagacagaaaatcggctttcgagtaaactcttggctgaaattcctcccaagaaggaatgagtgacactgggcaggaacttcagcttccagcagcctgggaagggttagatcttgatatatcacagctaccctgcgtggagtttgacaagtccctgcttcatagacaaagagtaatcatgctgaaatggccattgacttttctgttgaatggcaggccctggtaaattcaactcttgaagtgttacagcctattaaagaagctagtgagcatttcagtcctgagccatgaaggtactggtcccaccccttactcatggacagatatgggaaggtgattcagtaggtcagctgtcagtgtgtgccttccaaaacattatagtcatgttacagtaaactttttatatttgttgcgtcacaaagatttattgaagtgataaaagttattatggaaaacagtgtgcagtaactatggcaacagttatttgatctcacagtaattagctgagcatttggttgcccaatacttttcacaatgccttcctggttagttcattaaacaaaattagcttttgtttgaactgtcttcctacagcgtcctaaatttgattttagttcaaaagaattagaaagtgtattttaaaactacctttccaacttttgggttgtagccattatttgaagtcataactttttaatttaatcctctatttatgtactacagtgtgctatgattcattggttcatcctctgagtttcagtgtagcagagtatcctgagagatgaacagtgtggttgaatgatcctgtggtagcccatgcctggatgccagcttgtgtccttcctatgtctccactcaattcttgtgatactgtgttactgtaccatgggtgtcccatgatcacatgaattactttgttaacagtctgtgtctccccctggcacctggagctgggcactgcctagctttgctgagattcgctcaccttgctgctcttgccgtgctcctagggacacaggctgtgctccttcctctttctgcatgcaggtgagtcatgcagatagtgatgtcatccttggaggacttcctcttgagacgggggccctcagactttctgcctttcctgtcctctgtcgctccacttgcagaggtgaagaggggcacacccaaagaaaatgtcgtgcattcaagatttcaaatcaaaactcatgaaatatgaaatggaaagaggaggatgttcggatgttccagaatgagttagtgtgacttttttttctaattcagcaactggggttagaaaggttgctccccagtttaagggcacttgctgtcttccagaggacctgagttgggttcccagcacacaggttggacaggccacagctgccagtgactccagctccaagggaatccaacatccccggcctcatgcctacacttcaaaagagtaaaaataaaactttaagttcagtaaatgttccttgtatttcattttaatccttgtcagctcagttccgtgatacacacacacacaactagcttttaaaaactttccaagttttttatgatttttttttcctcatttaacttccaattgcctgccaattttcagttgaggaaagtttttcttacataaaaacagagcctttccagttctgagattaagactattggtttctgtttaggatgactctatcttaggtctccatccataaccattggcagaactctgttaagagcttacttgtccctgttcttgctgttgaagatttttaggacgatttgtccaaaatgaaagcagtattaattcccgtaggtagcctcggtgcctggctcatcttttctgctgtcttccccatcactgtctatattctggatgctttgagcatcataactggtgtcaaggacccacatgcatttccctcccacacgctctttctctccctagagtaacatcgtttggaaatttgaacatcctttgatacaacctttactggatggaacttctgtgaaatttctcttgctttccctcgtattatcacctgctcccccgtcatgccccggctgtcctgtgcctgattcttggccacgattatcaccatattacagttaaaggttaaaacactgttgcctgtgggctgtgaactccaggaaagagatactactctctgcttctcccgagtcgtccataggctgtgaccaggttatagccaagcagatcagtgggctagcctcacctcacgacctcctgaccctctgaatcctagtcatttctattgttcattttactgtccaagatctgccacggtaggtgttcaccctcctggctcttccagttttgcattcctttcctgggcctccaaaatgttctgtacatggacctccagtgctctcaggaaggagggaagacaggagctgttatttattggttctctgctgctcatctcggtgattcagcccaacctacactgcatacttggcccatttactagagcagtcaccagcactctgtgctcctttgatcacctcacctcccactgtgccatcggtccagccagcccctgtcttttgtcctgctccagtgctccaggactcttaactgaaacacaagctcttccagattgagccttctacagactggctgctcagacaaagatcacctaatctgcccagctcccaaccctgtgagctgccattgccaggcatggcttcattatagtcttccagggagcccttaccagcggagcaaaactaaactcgttcagatcttctcttctgccatactgttgctgagcccgtttcctgttccctggcggccttccatgagtccctctgatggcaagtccccttctcgcttgcttctgcagagcaaaggactggttgttttgaggccctacttcttgctttacttttggtcacactgcatcttctgcccactccgctgtcctcctatctctggctacagaatatcacttagataagagcacacaacgatgtttcatgtattttccctgatgatgtacacagtgcctggtacagtgtctgccatggtggaaagcccacgaacatttgaacagagaagaagccaaaagacaaaggagagtagattggaccctgctgctgttctatgtgcatgtacgcatttcctttttaaggtttcattgtgtatattcatcagcgtctattttcttctcatccctagaagcccagtgaagttagtgctgtcatccctgatacgtatgtgcagagaaaactcatagaagtcactctgcttgtagggggaagaacttcctgtctttcacaagcctgctcgatgccgtcacttctgaaaagccttagtatgcccctagccttccatggcactgttcactcatgggcgtctctacagaaatgacattgtgcgtggctcctgtgccaggtgcattacgccctcctccttgccactgcttacatgagggcttctggtatgtggggtctttgacagttttcactttctgtctcacactccatatgccagtcttagctctataacctcagacaagttatgagttcctcaggtgggtggaagtgtttcttcttttatgtgacccttgttggacatacataagggattgttgcgtagtgaccatttcccgtctgctgagttggaggctctgggacatgagtctggtaacgtcttcatcactaggctgttcttcagatctcacttgcatctttctgttgttccctgcagagggcctccccttctccagtagcctgtctgcctcttccagtcaagcactggtagtccttagatatgacgaatatggtgactaactgagaagcctctttgtaaagacctcaaaagcaatcacaggtttaaatgtgtgtttgcagataaatacatacatatgtttgcatataaacaaagattttgtcatcttctttaagtgcttaactcgcatgtgcttactaagacatctctgcagactgtaaattaaaagaatagccagccaccgagagttccaagaccaagagttccaagacaaaaaatccgcaaaaattctttgaaaaatttttggctagaaaattattttaattgactttttagtacaacttttgatgttaaatataatgtcagtggcagagaatctaaaataataagcatacttgggatctttaaaaatccattgtcagtgtccaccatgtgcagattttagttgattatagtgaaatgactggcggggagaaagaaaggtgttctagtaagtactcataaggaattccagaagcttctgggagctaggaccactggttctggaggcactgcaccatctttgggttctccagtggcatggagggctgcttctgagcaggcctggccctcctctcaggtttgcttctcagctttccctggttcctttggaggagaggaagtgtgtgtgtgtgtgtgggggggggggggggtctggagaagcctgagggcagaacccatgggttgctgaagtgagcgagccctgtggttgccatgccaaggcctggctggtgctggctcaagctccgtgtttgctttgtgggagcatgccggaactgacctttcacttgcccttcacgctctgggtgactcaaacgctgagccattgttttaggaactgattatgctttgacagtatggcagaggtatttcctcagtgctgggccgaggctgggaggtgggtagattttggtatgattttgcttcaattgggaggaccgcttttctctttctttgggtattgttttgctttttccatctgtaatacacatgccagtcccagatgctgaaattcacctgaacctgtccaaaaattgccaagagatcttgtagctttcactggcagcttgtagccttagtgtggcatttctgttaaaggctcactctatccttgccatcatatggaggccaagagtcaaaacagacaaatgtggaaatgtaagccatataaagctctgtgcttgtaaatcttcatagtagagcaactataacagtgtgaagggaggcttttattacgtagattcatggaatctgccctctctgaaagtttggagttgccggttaaatacgtatgtatttttcaaaggaaatcatcaaaaaggacattccgctcttattacaaagttattttaggggtaaatattttgatagatgtggttcggtgcacctgggagctgagccgtagcttgaggcggttagaacagatggagctctgagatagttcaaggcttgggttttcccctgtgcaagcacatggctggtgggccgcaggaaccttaactttctccatgctgatgttagaaaagtagctttcttatggaaaggtctcattactgaagcgttcggggaccatcgtaggtcttctctgaaataaatgtatagtgaggtctgttgtgtacacacattttattaagagagagaatgcagtctctggccaggagtaagtcatgtcaggactgcctacatttgcatcaaatgcaaaggtctgggatttgggcgctgactgactgacaggaacagcagaagcttagcaagacagaaagactgctgtgagcttccttcttttttgaagttgagttgaatcactagtcagattgaaatcctagcatataatttttaaaaatagtctagtgtgtcatccaaccttgtcaggaaatcagtgtacacgagcacagctctggctgcttcccgtgctcacctgccatttcagtagagagcttgcttggctagggacattctacaattctaacacttctccctctttgactaaagtgatcttttgtcagccatgaaagtatttgtccttgtgaaagtcacctcgtaggagccgggtggtttggtaacctgagtccagtcatggggccccgttcataagttagtgatcttggaacagggaccatgtttgttggtgtgatttgtctctgttttggtttggttttgttgagaaagtctcactgtgtagcccaggctggcctggaaatcaagccaatcctggctcggtcccctaagtgatgagttttacaggtatgagctaccacacccagtcgtttgtcacttcttatttcctatctcagaataagttccccaagggcagaaaccacctttctgttctcatcgagtagttgttgatgatttgttgacggacacatagctgagaactgtttgtgtnnnnnnnnnnnnnnnnnnnntgagttaacacatggtgatggtgatttttcagcacttccttattagtagcacaggcaggaacatggatattgcaagctcgccaagcgctaacccttcccacccttggtaagagttcctgataaacctttggcttttgaggagagagaactaagccccagtacctcctcagcaaccgcctttctagatgcgggaagtggatctggactgtcagagctgttctagtgtcatggaggtgtcctgtgtttgcagcagctgctagccctattgtgctctttcactgaacgctctattagcctttgtgccatctgcttatttgagacaatacagctgggttgactgcagccattccaacaatcaggattttctttttaacaatgtgaacattgcatactgcctctcattgtacacagtattaagacaaaaaataccatttagaaatggttgtgctaagctcattttaaaataaaaaggttctatttaaagttcagctggttatagtataaaccggttctgatgactcattctagcgatacttttaccccccacctgtgcttttagtagttgtttggggcccagacaggaaaaacccttacattatgtagattacttatttcaggcacttgatttagtagcaacttgttgactaattgaggaaacacttttagttagaaataattagaaacactagaacatccaatttggtgaagggcattgcattataggtgtagttcatttgtgactgtatgtataaatttaataatttttcaagtgcgtgcttgcctccagcccctgcctgacacagttataatcttcctcacagtagctcagctgcaggcaggagaccatcgtcatttcccaggaagaagcttgctggtatctccagaataggtcagcgaatgcagtctcagctgttctccctgcctacaatctttgtgacaatcataaacaaattaaatggccttaaaggactcagaacttttgaccagcaacctgctttcttccttaaagtctgtgggtatgatctagttagcgagtttccctcacggtgcagagagggcagcatagcatagcaggatgggtcatccaccctagagccatgaacaggacttgcagtggagttgttcacattcagggataagtcttcccttctaagttgaacctttctggaaatgccctcatagatacactcaaaggcgtgtttccatggtgattctaaatcaagtgaagtttacagtgaagattaaccatcacagtcactaaaaatgagtgaataccactcactgcacgacccagcgagactggcagagtagtgaggggagaacaggagtctccatggactctggcgcacttccaggtcatcctctgaggggctcagcacactctgcactacagagtccaggacacagagtacacgagcagtctgctgcctttgtaggcactgtgctgaagaacagatgccctgcctgccctggctactgctctcaatgatagtttttctagagaaaatgaaaattggtattttgctttttaaatattcactactgattacatttttcaaagcactgaacaaagcctatttacaaattacaggttatatatgattggtaggtcttatatggtatgctaattgctccgatttaagagttgatatttagcttttcaaattgttgattttgtgttttaattttaagagaggtataacccaaagaaagtcaatactctctgctgatgaagacttgatcgtttccagagacagtttcagtacaccagctgtgtgacacccagcgcttaggcagtaagagtactaaccagctcatgtcttcaaagtatctgccactgtgcagaagcaggacgccacagcatcacagacctgtactgcaaccttgagtgtagcagtgtggagcctcttgggtagccctggcttcttgcaagtaattttgcctgagtcatggatggaaacggcgagatttggatgagcgcagctgtgcttgtcggaggtcagtctagcagagctgttgaaagagcaagcagaaagcctgtgccggcgtaaaccttggcatgctttgtgacagcagtggtatcaccaccatattccttggcctctctgtggtcttgctttctgcttctctgagtaacagtcatacaggttaagtagtccttatccaaaggcctcagacacacagtgttggaggagtcttcagatatcaccatttttgcatgtatataatatgataaattagggacaggacccaagtttcaacttaaaatgtattaacattgttttcaataattagcctatacatgtgggttaaagataattttatgcaatattctaataatttgtgtatgaaacagtttcgtggtatgtgatattccacccttggtaataatatctgcatcctagcgtttcagtgattacatcaaatattcaggacctcacgcgtggcaaatgcattgcagttattaactactgcccctgctactgtttgtaattacaaaaggcctgaggccaaccacggctgtgcctgttagtaattgtgccctctagattctgcttggtgatctctgtaaagatcaatatgggcaagaaaacccaaaggtaaaatgtaattacatgtgaatgcacataaaggtttcacaaatgcaaagtattgtttggtgtgaaaccttgtttcaaaagtgaagacatggggtagaacctttccatgtttgcccagcactgctcagaccccatgagaagtcattcgtgtgtgttcaggaatttcagctgtctctgtcgcttctgacattcgagacatgttatgcaatttgctttcagtgtctttagacctcctgaaagaaacattatagggcatgaaagaatttgcatagtgtctgcacagtcccccatcagtgttggtgggatttcagtctctggaaagggccttgttgaattattccattccatgataatattagaacaatagccaagactgtgatatatagtcccaggagcagttgatttttatttgggggtgggtgggggatacaaccaaatgaaaatagattggtcaaaacactgaaaaccccatttccctaacatccttatttttatagctaatgtgccaattgactcatagataacacctgtgtcgtttatttttaaaaaccttactgaaatctacatcttagtgaaactctaggaaaaaaatcacaacagctgtccaggcatctgtttgaatgatgcagtgtgaaaagagttctaaatataattagaacgtaagacaaataaacttgcagagcagtactcaagtatcaattgaactagatcagaaagaacatgccattcaaataacctaaatctagagtatttatggtttgctctggaaagcaacagatgtttgccttgagtggtctttattagcagactcaaaacacaactagtccattgccactttctgggtgcagagagctagtataccaggatggggggcgggggtaggaatgaatggtgtcaggctgacagtgtagctcacttggtagagtgctcccatacatgtgtaatgtccccagcacggcatagaacagacatggtagtgcaccacctatactcccaggacttgggaggtggaagcagaagactcaaggttctcctctgctgcagaaggactctgaggccaacctgggctgcaggagaccttgtctccacaaaactgaagtgttaatgacccggcacagcgggcttttgcaggacgtcttcatcacaccagtattcccaggatgccctgtttcgatttgacattccaggcaccccagttagcacctctcaccatctatcttagtctgttttgtgtttctgtagcagaactctgtgactgggtaattgataaagcaatttatttctcaccattgtggctactggggaacctagtgtcacggtgctagaaactggcaagggacattacatcgtgccatctaaaggtgggattcagaagagctttgctgttgtgttgcggctgctactgttggctggttggattgtttttgtttgtttgtttggttggtttttgttgttcttggttttttgtttttgtttttttggggtggtgctactggatatcaaatccatgttcttaatgaatgtcaggcaagctttctaccactacactataccctcagcctgctgaactcacagtctactctcaagagtgccgatccactcatggggaaagggccctcctggtttagaaaattgttgaacgtcccatctgttgacactgttaccgttacattgcattgtgtttctaacacatgagctttggggactgaggcaacatctgtccttccttcctgtccttctcagtagctcctaagtgtccatacttggctgagactggtttcatattctgagaattcaaagaagagggtagacagtgtctcctttcttttaaaggctaagtaacatgatgcacattttatttcaggtactattcggcctttaaagcttttagcattgtctggcatacagtgggtatcaattaatgaccccagtgtatgacaacatacacgtttcaataactgtagtttatggagcgcttgtaatattctagaaaatctttgtacatatatgcatgcaaatttgtgtttaatcattgttatcctatgagtataggttattgtcccagctagtcccaattcatagatgagctgcctgaagttggatggtgatctggagttgtccaaggttacacgtatgccaggtgtgtcttaagtacaactttagtcctttaccattggaatgttcctcagagtctcttcccacagtccccatttcccattgtccaacaacttcctccaaggacagtgcttgcttgcagcatgtgtttcctgctgttcagtgcctgggaaaactaatttcactgactccactgtgaatatgcaactttgtagctttttctcagggctacaaaactttgagaaaacaagaggaagttaccagtcacgctgaaagttgtcatgctaataggttaatgatcatactaatgattagtaatagtaggagggaagtgagggaggaggtagggtatgagtctataatatctgcccagtttgtttcagggtgttcagattctttcacatctctgaacggcccacgcctcactaagtctccctccatttggtaggtgaagcaactgagacctagagcagttggcagaagacattgctcaaagccaagaatctatttccagcaaagctgagattcagatgcagtctagttcctttttatcctaagaaaaacctgcctgtctggtggttatctatcccagaacctcaggggtcgagtgaccttcctctaatcccaccacacatgcccttcatctgtaggattttaccagtcatgtcagaaaccttggaattaataccatacagagtttgcatctctggttttgctgtgaatcccatggcacacactgccatgtacctgttgcctctgacttccacagagagtgagaggtcttggcacgtatgtctttgtacagctctcccagcaagaggccgtcgttcagtagatgccctaactaggaaagcctgcttccccaggacctttcctcacagtccctctcactgagtcatcagctcgcttccttcactctcagcctacacgttcactcaagtctctccttccaaaaggaagggcaacagaggctttctgtatgtggctgaggctgcttctcttcctcctgctcaaaggagaggcctcactcttgagtaaacacagtatcctgagtgcctccaccatgtagtgaaatctctctgagaatgtgctccatggctgcagtccgcccaagtttccgttctgtcttaactaagcctccatctcttaaatatttccagtcactgtttgtgagtttgttggtgtgttgcccagactgacgtctaactcctgggctcaatatatatttcttcttcacccttctgagttttcaagagcaaaggtatgcccactgcagtggttcatctaatgacttagtgttctcactccccctttgtaatctctgcttgggttccttcttaacgcctacagctgccctgcaggtacagttggtcaggattgtcttcctgacatttacccttctgtactgtctctgactggtcatttctggagttgctatggctgcagccgccatcccacccacatgctgtcaaatgaggtctctcctctgatcttaaccttactgctcctttctgtctcctttgggatatcttaggagcattccagtgtcactgtggcccccttccgtcctgcagtccctccatcagttaggtcatcatccactccacagagcaccaccatcaatatgagtccagcctttgtcctccactgcctggaagcactgctcagttctgtggctccttaggtttgtctcagatgtcctctcacacagtgagagctctttctctggcagttatcctttgtgtctgcaatacttccctgttttctgttgttagagtgagttctttgtccatcagaacttcaggcattaccactggtgtttctttacgataaatactcttctcttaattcaatcttcatacttcctctgtctacagaagtacctaaagcttaccatgtccccattaaatatttgttgaacaggatgagactttctaaaataatcaagagtgtgtgaaatgtattggaaattaggcagggggtgcggtccttgggaagtctgcaagttcttattcagtctacctttttttgtacagtaggatattgacaggtatcagttccatcttggatctcttctctaccttcattctcactcttgtctgttcctgcttactctcttacactcagctctctgtcccaccagaaggaggatttagatgcccctggcatggcacctatcagtcatgtactccattgttcatcgtgcctagcctagctctaccttctagcttttaatgaataacgagggggtatacatcgaaatcgccagatgtttgtgggtgtactactgttgaactctctgtagagcagatgtcttcccacccacctcacccctgaatatacactttaagtctcttgagttcaacctgagagccattcttgtatttgagttgcgttcaaattctacctgcttcagttaaccagaacagctgcccagtcactgtcccagtcaaagcatagattatcaaagcttcttgtttatgagtcacatatgccattgatgtttagaagacgaggtaacttctaccctgaatgcaaactagtcacaaaagctggtatacacatgtgatagtattttgtgtctgtgtgtgaagtttaaagggtgttgggttttgatgttcttcctttgaatgaaatgaggctgtattataaaaagtcactaagttttaggcaagtaccttagaagtgtaatcagaagccctgaatatgaaaactgacataagcagtgttttcatgacatcgagaaaagttgcactgtctgctaatagaccgatgttataaaaatatggaaatagggactggagagatggctcagcggttaggagcactgactgctcttccagaggtcctgagttcaattctgagcaaccacgcggagatccgacgcactcttttagtgtgtgtctgaagacagctgcagtgcactcataaaaattaaaaaattaaaaaatctttttaaaaatgtggaaaggggatttaatattcaaaacaattagaccaatctccaagttattattaaagtaaaaagatactaacacagggtagctatagcaaaataatggaattacaaatttaaacattggggaaaatggtgtttgtcatgagagaaaggcctaaagcaagcgttagaaatggatgtcatcactcttcctagaatacctacattttcctcatgaattgcctctttattcctctctaaactagcctctctggccatctggcaaaagatggcttccttttaccactgaaggttttgtgtcctctttcagttcagctaaagaatccatcctgaattagagtctcagttccaatttcagcctctcagaagagaagttggttcatgtggcataagtcaggaatccactgcggtcccagcaactgtagccaaggagacagggccatgtgatggaaatatgataccatagcatccacccagattcaccggagatgggtggttatgtgctggactgaccgaccaccctttcaccaccagactccgaggaagtataacatgaaaagtactctgtagtaacattcgtcgggaaaatggtttatagcctgatggccagggtctgccacctagtgactcaccttgatgccaggttctagctcaggggctcactcttcattctggagaacagagagaacacagagaagtgcccgactacagacgctctcggtgctactattcaattagcagaagaaaatatttgctgccttcctggtaatacatataggcaataaatgtctgaataaatccaaagcagaattgtagtttacaaaggaagttaagatggggagggaaggagagacggacatgagaacaaaacctttctacaggcattaaaaccaaggggatggcagtggtaatcatacgattctgtttacattttatctattcataatttcagcatacacataaactctgtggtatgcatttaaacatttactggttcattgaaaatattagctactaaaaggtttttataaaaatagataaaatacatgccactaatattggttggcaactttagtattgactgaaatttttagtttttactttccaattttaaattgatatgctcccagcccagagtttgatataattataaataaattctggtagtaacaagcagttaagtgtatggttggagttactaattcagtcaactctataaggagatttggactaaaattttataagtaacacagactgaaagacattttctctatgggacaattaggcagttgctaaagctatgctagaatgtgttttgccagtctgatggattgtctacagtccacctggtgatggtaaaggaccaggctgaaagaatgtaggatatgtgaggtttgggagctgtgccaatatagtggttgccaataccagctgagaaatctactctgcaagcaaaccagatctaatagtagttaacagccttttacctagctttattaattagagcaactcctgttagtggttatttgaagcgtctgtataaacagctcctgagctcagggcttattactataggtttagtgtagttcagtgtagatgaggacatgtcagttccatgaggttatctggagtcctgggcaccttccatgtatgactccatcatcctgaatcccctccatccaagctggtgcaagggacaagagtgagcttggaccaggtctgtaccagaaagcatccattacatcatcacgatgtatttcaggggtgagtcacacaggtgtggtaacactggtctctaaggagcttggagaaataaatagtcaggaccctggaggaaaacattcgtattttcagtgtttgccatactattaggatggagatttgagaggctatggaagcattaggaaaggaaaatattgtttaaaaaaaaataggccaagggtcctttttgtcttcaaaagaattttattgaaaataattcaaattgtttcaaagttatttggcaaaaaaaaaaaaaaatgatagttgaaattcagtgggtcaccttacctctctagtactacaggtagtggtaatagcttccacaggtcacctgtgactccctggttctgtccactgagaaatccagacgagggtgagagtttatagaggctgaaaagtgctcagcccgggtcagaagactgataggcattccgtctctgcacagccccgctgcgctgagtcttctgcaggtgggtcacagcagagctagtttacaagattgacaggtgaacacttgttgaatatccccatagtatggcactgtggggtgcatgcaagggtgcatacgtttgggggggggnnnnnnnnnnnnnnnnnnnnnnnnnnnnnnnnnnnnnnnnnnnnnnnnnnnnnnnnnnnnnnnnnnnnnnnnnnnnnnnnnnnnnnnnnnnnnnnnnnnnnnnnnnnnnnnnnnnnnnnnnctgtaacgagaacctgagacagtcattataggaggaaagtatgtatctctgcgctgtggaggtcccagtccctggtgactgttgagccctgttgcttagggactgttgcaaggcagcacgtatggtaagagtgtgtggcagagcaaactccagcctgcggctagggagtgagagagacagaaaagacccaagtcctgcagtcagtcctctgtgggtgtgtcctcagtgacccaaaggcttcccatagaaggccattctacttctacactagcttatagcacagagcacttagctgcctcctatgtgccatgcaaagtttgtttgcgctcatatcaacccctgtgtattgctcttattttacaaataaagagccatcaaacaacttgccagagtttgaacagcgatttaatggcacagttagactctgtcccatggagcttttgtctgcctgggacagaatccaactatgaacttaaatctgtgacctcctaagcatcaagctacaatgcaggaattaagacaccagagagacaaacatcacaagggttggggggtaagggttctaaccttaaataataggaaaatagagtgctatttcaccttaaattctctgggatctagtccattaatccacatcagaaaacccccagccaggaagtttatatggagagattcagactgggaagtttaagagcaggaaccctattgcaaacaaaactgcttgggttttcaaggcctcgagttgggtctgagtagctcctccccacccccatatagcacagcgtgactgtcaagtcagtcagttttacagtttagttgagtttgagctggacatttaacagttcactaaaagatgcctgggcatctgccctgtgcaaagcgtcacacaaatgcttttaaatgccatagtgaggaaagtgcactcatccagctcacagaggtgagtgatagaaacagggtcttcatgtcttcaacatgacaggccaccatgataaggagcccatcccttaggtctgcagctagtgagccggacaggagacaatgatgctgggaccctacatcacatagtcatcttttctcttatctgacgtcctgtgagtctttcgctttagctttgatagaaccacatacaactcacctgttcagagtgaattttacaagtcttcaaagctgtgcgaccatcttgacaacaatcacaagaaaccctctgttagtattcacttcccgttttcttccaggccccccagcgctagccgctgcaagtggactttgtatctctgtagacgtgccatttggatatcgcatacaaatgtgttggtgtggtctggtgtgtctggcttccctgactaggcatgatgctttccagtgtcatccatgtggaagcatgtgtccacacattcctcttcatgcctttaacccattgtatggacacgccacattgttgactcacgagctggcggtcattctgcttgtttttctcttttgcctgtgatgaataacgctgcttgaacatttgtgtaccagtggatgtgcgttttcattttcacttcttgtggtgtttatctcagagcacaactactgggtcatatggtaactctatgtttatcctttttaggaactcccaggctgtttcccacagcgagggcgccattttacatttccaccagcagtgtctgagggttccaattgcttcccgtccttgccagcacttgtcactgcctgtcttcttactgtagccattgtagtgggtgtgaagtggtgtctcgttgttttaccttgcatttctctgatggattaatattgtggtgtttatattactaacctaggcagaagtttaaatctcatactttcatatagaaaccactgcatattacttggattaaccagtaattctgaagcaaaaccatagttctgtaccagataaatgtcgttcatgaaattatacttgaaaaaaaaactacaaagtaaaatgacttgggatgaagataacacactcacctgggacattagttttgcagtatgaattcatctgcagtgttctttatctgcactactaaaatgctgttgtgtgacatttactggataatccagacagcacttgactaaatccacagtatggtgtcactgggtaaacacttgaaaatggaaatgtgtatcccttctggttttatcagttgagattaaaggtggtttatagcacaggaaaccttttctccaccaccctgtatctcagtgtgggccaataatctgtcacctgaaaccacttaaaataggttgggctttcttgactgtcctgttgctgtgatgacatcaggatctgactgcagaggggagaaaagaacacttctctgacttgtttgcctccatgtcctttgtccccagttaaaagcactgcccttctttagcccttacttctgtctggttctcagatgttttctacaccgtctgtctctgtggagctcctagtctgctcacagttgtttctgtcaaggaaagctccgtgtgagcttggaagtgtgagattcaccagccctagatatgtacaaagtgaggaggggctggtggaggaaaaaagtatctcaaaccaaactccaaagatgctttccctagaaagagtctcaggacagctttgaaagctccccaggacaaataacttcacaggagaccagtggtcctcactggcacagagagagcctcaccagtgctaagcttcctgtgtgctgtgcattcctgactgcattcggcactgtttgctgagggcctgcaggggaccaaggagaaaagagaaaggaagagtggctatggctagttccgcccttcttagtttctacctctgccttatctgctcctcatcttactgtgggcctgtggctcggctggggagtggttccaaagaataactaggttgattggcaggaattgaattctgccaccccagagtaacgggaggcaacaacctcagacccttaagctggtttaagccttcgtgagttctcttttgacactttttgaaacactgctctgggtgaagcaagcacattgtggctactaaagatcctggacgactggctaaccctggcccatgtgccttcaggactgttacagaggaactagataggaatcattggtaggttagtagcaattgtggtttggttctgatttttaaagtgactagccctcaagtaacagaaaaataaaggatggcaagtgcttgttgactggaccgtttgctaagatcgtgcgaatagctgtgcataggctccgggctcattttttccatagccctctgacatgacaaggtcaaccttcaagtgagctgtaatgaaacttcgtgcatcccagccgtatccagtgtgcccttagcttaacactcatctgtctgtgacctgacatagtgaatgtagtggctccctgctcccacaagtcctatgaggaatggtggggaggaggtataggagtggagagggctgtacagcaagaacttgcccacgttaggaagccagctgacaggtttggctgtggccgagcttattttccattggattctgagtttccttgcagcagtttttacagaaagctttaagctccttgccttcatagtcccacacaggaggggatgatggccgaggaaaagcggattcatttgttcctgtaacaaaagaatcaaatgtacttctgtggaacaaaaatgcattggaaattttgcttgttgttttctattacaaaattgaaataaaaaaggaatgttacctgtactgattttcttatttcatatggaaaataagaatatgttgccgggcagtggtggcacatgcctttaatctcagcacttgggaggcagaggcaagtggatttctaagttcgaggccagcctggtctacagagtgagttccaggacagccagggctacacagagaaaccctgtctcgaaaaaacaaacaaacaaaaacaacaacaacaacaaaaaaaaactttaaaaaaaaatgtgtgtgtgtgtgtgtgtgtgtgtgtgtgtgtataaaagcacttacaccgctgcctggtcaaaagactctttgtaagtccagcctgtgggacctgcagagaggtccaagaaggccatgggcctccttcactaacaatgccaagcctgtcgctgttgagagagggaggtattctgaggtctttgggagaatttagaaaggtgtcagtcaggaagatgaggtgtttggtggcttcatactgagttatgaccacctgctctgagctctctaactgcttatttaaaactgcagggtttgtttcttgttgccatgagtgccaaaggagcccaacagacatgtcatatagnnnnnnnnnnnnnnnnnnnnatccctccctcccccctctctctctctctctctctctctctctctctctctctctctctctctctctctcacacacacacacacactattaacagctgcttgctccattctgacttgtgtgctttccagctaaggtgagtgtgtgcagtgccgtgactaacgctgcactcctctcacagatgctgtctagaggggagctctcaagtcagcaaagccccgaccttccctcacccattcctccccaccaccagactctcgtaggagcaatcctttcatctgcccctaagtgacctccttgggtagaccatgccctgagtctggcagcttagtctatttcctagtagaaactctttttctcagtttagggaaattttatattcgctgtgtcttgttcataaaagtattccttccagagtgacacacggtgaaaatgagggtgggatgccttaattaggagacttcgttgattgcttccaataagtaaagcaattatgccatgtatcggaatatgaatgcaaatgctttgtaatattaacccttgatgtggaagaagtagcctggcctttgaagtcaggtaattgcaaaactaatgctgactggatgccaggcactgttgcaagctcctttataagttggttcactcacgcttacctcagccctctgagagtgttctattaatatgcccatttcacagataggaggaaacctggggtgggattaagaaagctgttgtgagtgtgggaaccagcagttgaaatcaagtgttctgtctgagtccgagcttccgatgctacacttcagtctccaggtagctctaggagctaccctgtcctcacggtactttgctcacccataaaactgggcaaggctctttgaagagttaaaaggagagcaaacattgctcttgcagaggctctgggtttggttcccgttgtcagacatctcactctgttgtcgcctgtaactcctgcttaggggatccccgcctgcatacccacacagggctgtgcacagaatttaagataaatacattgtttctttcaaatgaattaaatggcttactatcaagcatgaccggggattcttaatggtgactctacacctaactcatttgtgggtttcttttgtttcttgttttggtttagaccccacccagagaactcgtgattcatttctataccccatggtatgtggtctcttatgaccaatgtaagatccctgtcagaattacttcagagtaagcagagtggctttttaaatgactcttgttgatgactgtatacctcatttcagtgttagtcagccaggactaagacaggacaatgggaaagggccagcctcataacctgtaacagttgttcctgagatacgtaagctgccgccctcgccccctcgctgctgaaagatagcgtattttataaataaccgatgcaactgaaaaggaacaaattggttctccctctgtttgatagctcctctgttgacacccagtgacctatctcaaaagtaaacctttaaaagacatagagtgttgcccacaaacattttacatttttaggtccatgaacagtggagctcaaaagggcttaaatattctgactgatacaggcttctcatcaccaggtcccttactcagagagggggaggcacttgtcagcacactgctttccaaacgagaaatgagctccccaaaagaacagttgcccctgcagtgttttatataatgagagtttgagataattgctgtgttgatactgaagcacttttgatttataaagcaagcattcatttaagaaaatgtcacataacttgaaaattgttatctgaacatatgattttagttttcttttgcaggaactgacttacttcaaggccatgccatttagatctcaggctaagccaaatcaaaggtgacaaggcacattaatgacctgagaggctgggctatctcacagggtggcactatcccattcgacagtcatttattgagtgcttacaagacactgtgattcacatgttcaaaggacactgtcccaacacttaagtacatgacagagggaggcagtgacattcagctgctgttaacggtggaggaaaatatgagtatgcaggaggggccctggaccgagccaggagtagaacaggggaggggatagggctgagctacaaagcttcctgtaggacggacagctagagtgattcctagaggacaggttactgtaggtggaagaaccttccagctggtcacttgtggacagtgtaaacatcctgcctaaccaacatcaccttggctacagggaaggcctgatggtcatctgatggcttcagtcttagatgatctactggcttcagtcttagatgacctactggcttaagtcttagatgacctactgacttcagtcttagatggcctactggcatcaggtcgtaacattatttgaacatttttaaaagtcatttttgtctcacaatgattagctaggctcagaagcgcaaaggaataagatatttgggacttgcctttttgcctctggtttgtgtcacctactctcctccatttaccacttgacagggttacataggaacaagcaacaccctcagcagttaggccactgggaaagagaagcccgtgccaccagccacagtaaaccttatccccagtgtcactggaattgatgccactctgaccagtggatcctggtgaccatgtcagtgccctttagcagactaacctctctatacttggctctcttctcaagataaggaataataatagctccttactataccacactaccctgtggacatgggggttgaggctgacactgaatgaactcactcctggggcagcaagaacaatttgttagctgttaagggacagagtcccagttcctttcatgtgagactaagacacatacaaggacttctgcaatccagagctccattttctgcagatactactttgtcattcaagccagtgtgttcctttcatagccactgctagtgtgctatgtgccagacactgttctcagcacctgggatagataaactcaggaatcagtccacacagagtctgagctgtggtgtgggagttaatctgacacatttcataactggagagagggagaaggaaggaaggaaggaaggaaggaaggaaggaaggaaggaaggaaggaagagggagggagagagggagtgagggagagaggagagagggagagagagagaaagagagagagagagagaacagagcttacaaggcccagatgctacaagccctaccaagccattgtagtaaaaactgagcagaatgaacaactactagtgactattgagcttgcaggatatagtaggcactgggttctgtgttttatttgaaataagcagatgaagcctttatgtaaagcagatgacactggctccaagggaggcaatggaggagtttgcaaagacagggctctctgattctgaaatgcaccttggtagaagggtgtgtgtgtgtgtgtgtgtgtgtgtgtatcacaagattgggaataacaagattaattttgggctgcacttggcctccatgtaacccccttccttgttcaggaactggggagcaattttggtatctgtgcttccagaaggactagaccaaagaatccagcctcataatgctcactccttgggtgtttttcctggagcactaagcaggttcacggtccaaggtacagcttccctgcccatttttaaagaccccagcatttctgagtgcttgttacagacagaggaaaaaaactaaactacagaaaactcagtttcctgttcttggttatgaccagaaaatgaggtggctttcagagcagcatcagtgacccgtgaacctgcactttagatgtgactcacagtagtagcctgtggaaactggcagactccttgttctacaagatgttattctgagccaagtaaacacccccaaagtcaagatgcttgtttaagaccaaacctcaaggtagaatgtgaaggacgggcagaaggcttattgaaatacgtcagcttattttgcaggacaaaatgaaaacctgccagacactcttaattcatacattactgatttgaaattcatgaaaccattgaaggggctgtgtaataataataataataataatagtgaaggggctgtgtaataataataataacaacaacaacaataataagtgagagtcttactatttagctgcctattgtttatttgcaaagcacagtgctggccatcaacggtgcaatataagtgaccactggcttctacccttctgactgtgtaggtaatttctaagtatgtagagtgtagtataactaccctaagctgtgtcctgattccagttgctctacacagaatcaatttgtacttacccagcaacaaaagaaaagagaataaaacaaagaataatgtggatggtgagtgtaattccatctgcatttccagagagagcagcctgctgttcctttcagttgacctcagcttcctattgctttctcctgtctcccaatgtaagattccattgtatctagtgtttgaagataacattttcatagaacatagccctaggatgctatatctgcttgctgtgagcaaagaagtagcattctttccattgctaaaactaatgccagctgtgcttggcctcaccaaggggtcagtttttctttgacttctatgatattttcatcatgttctttggctagagggtttatgttctaaaagagatacagttcgttgtagtgatagatgtacagggcaaagtcaaaccttttataaattcaagaatctgccaaattgggctggtgagatggctcagtgggtaagagcacccgactgctcttccgaaggtctggagttcaaatcccagcaaccacatggtggctcacaaccacccgtaatgagatctgactccctcttctggagtgtctgaagacagctatagtgtacttatatataataaataaataaatctttttaaaaaattaaaaaaaaaaaaaagaatctgccaaattgggaccatagccaaattattgggcttctgtctgtagctagtcattgcccacattttttacaaatctgtaaaacaaagatagttatatttacgtcattgatatcacaatgtttaaatgaataataaagatcctgacaagcacgtggaagtccattgctatccatccctgcaataagtatgaatgtagtctgcctatgaaaaccaaggacagggtgtcggcagaggggtgacataatctatgtgattttagaaaagatgaccgtggtgactggagagttcagtacttggtgtgctgacatggggacctgtgttcagatggtttgcacccatgtaaaaaagtcaggcatggtggcgtgtgtctgtgaccccaaggctcagaaggcacagacaggaagatccctgggactttctggccagcaaatctagcccagttggtaagttccagacttgatgaaaatttgacatcttagggaaaaaaggataatatggtggagaaggatgtcggaagatacccagtgccaacctccacaagtgcacacagaaagtagagattactgtggtgtccgggctaaaccatagcaaacctagaataaggagatactggcatattggcaaagatgagggcctgagcaaaagaaaatggtaatagtatgcatggagttcagaggtcaacctgcaggaatcgaactcaggtcaccaaatttgagggcaagcacctttacctgctgaaccatttcgctggcccaaggcttggcagttttaaaagtacagtggacaggacataggaaccacttagctaagggaacataggaagagttctaaagccaaggatggctttgagttcttcaggctctgtgggtggaatgatagaaaggttgggctagctggggcagagagtaataaaaggtactgctgtaatacaggcagaaattatatgcctggtgttgagctaaagaacttaatgtagtgcttggtttagtcatcatgacaagtctgcagtggtaagcagtggctttgccattttaccactgtggaaatagaagctcaggggaacccagagccttgggagaaaacatgaggacaggcatgtgtgacagcaaaggctacttttaaaccactttaagtaaactcactcagctcagggtggcttggaacttattacatagcccagtctggctgcaaactcatgacagtactcccacatcagcctcccaggtgctgggattgcaggtgtgagccaccacactgagcagagtggggattctggatcagaaaaagctgcactggaattgctaacattgggtgaggtctcttgaaggcagctggaaaagcagacctgaagctcaagagagggttagggtcgaggtgggggtgatgggaagatgggagcttgtgctgtgggacatgcatgaggccgctgagcagggccagagagtaactgactaaagagaagcatggcctaaggacgtgaggcgagtgctcgcctagccttgggctttaagaatgcatgtactgttgagctgtgtacggttttttaagaatgcatgtactgttgactgtgtacggttttttctggccaggtttaaacattgtgctttggtgtgtaagcttttcatcagcaccgtattaaactgtccattgtacagttattgttggagcttagtttcagagcaaatagattcttcagtacaaaagccattagacaaccctgacaaggcattatcagttagagctcaccccaaagttttgtcatggggcattcttagagagtcctacataagcttaatcccaaagccaggctcaagggctaaagccaaggaactagactctttccattttaaagaaacactaagaagccgttattttccacctcctgtcccacccccttgcccttttgggaccccatagccccatggaaactctgtccctcttccatacatattagatcaaatgtgtannnnnnnnnnnnnnnnnnnnnnnnnnnnnnnnnnnnnnnnnnnnnnnnnnnnnnnnnnnnnnnnnnnnnnnnnnnnnnnnnnnnnnnnnnnnnnnnnnnnnnnnnnnnnnnnnnnnnnnnntacacataggacctgggtaaaactgggaagcagcacatcatttccccacgcgtcagagcagcacgcctcgggcctctggtttatagtaagtagtctgatcttccgttataacctttaccttggtaggcctcttcattttaagaggcttcctctgtgctaaacattgttaacacagagacctagggtgctagaaagatggctcagcagttaagagagctcactgttcttgtgaagaatgctggttcagttcccagcacccacacaaaggttgccagccacctgtaactcggctttcaggagaacagaagtcctctctggctgccagaggctcctgcatgtacatggtacacataaactcacatagagaaacatgtacataaaatggatctttaaaaaattcaataaagaaagccaggtgctgttgtcacacaccttttaacaccgtacaagggaggcaaatctctgtgagtttgagaccaacctgatctagagtgagtccaagacagccaaggccatacagggaaatccttctcagaaaaacagacaaacaaagaaaaaattagaaagaaaggaaaattcatagacgaacagaggcgctggggtttgaattcttgctgtgctagtcactgtagggtgctggacagcacacttagcctcagtgcgtcagccctctacaagtgaggtgttaatagtgcctacagtccacagggcctggtgaggacaaacaccattcttggcgtacacaagacagggctcttaacaaagcagcatctgttggtgagggctcatttcccagcccagcacagatccctccaagccagctctcacctaacatgaagagaagagtgtaacatctagctccactttgtgagcacctaatccattacttccatgccagagaaaagaagctctctcctttttaaaatgaaggcccctgcttggtgacacacacctgtaatcacagggctcaagtggcaggaccaggatggtgaattctaggccaacctgagctatatagcaataccttcatattctctctctctctctctctctctctctctctctctctctctctctctcacacacacacacacacacacactctctcacacacacacacacacacacactctctctctctctcacacacacacacacacacactctctctctctctctctcacactcacacacacacacacgcttgtgcattagagacacacagcaccttcttgtcccacaccacacagtatggtcgatttcaaagcctgccactcttggggactgaagcgatagctcagcagttaaaagcactcttgctgctcttgcaaagctgagttcagtttccagcactgatatcagatggtctgtaactgcaactctggggcatctgacacccttttctggcctctacaggcatctgaatacattcagacagatacatacgcataaatgaaaatgactttaaaaaagaaaaagaagtctgacagccaggagatagggctttggaagcacgacgtagaaaaatgtctggtttatcataggcacagtgggcaagcaagcatccagacttggatgctaaagtgtctgatcatagggggatgcagtcttctctttgtagccgaatgaaattttccaggagaccttttgagctgccagttgacagccctatatgacatgtctgttgggctcctttggcactcatggcaacaagaaacaaaccctgcagttttaaataagcagttagagagctcagagcaggtggtcataactcagtatgaagccaccaaacacctcatcttcctgactgacacctttctaaattctcccaaagacctcagaatacctccctctctcaacagcgacaggcttggcattgttagtgaaggaggcccatggccttcttggacctctctgcaggtcccacaggctggacttacaaagagtcttttgaccaggcagcggtgtaagtgactttatggaagacaagccagcgcttgtttcctctctgtgctgtaagggttaagagtcatcactgtggtcaccaaggtcagacaccagctctcagtgtgctggttccagccacagatgtgtttgggttggccaggggagttgtatacacatgtatcttcggttgcaacatacaccagttagaagggttcccatcagaatcagcatttccagcttcttttagtactgtctctgacagcacaggctgccgtgtagaggctgtctgcctcagtgacatggaggtccctcattgacccttctaccttgacgtagcttcagcctggcctacttcctggatgcaggtttaacagtgttcctacagagtcctgtgccattttctctacaataaaagtgaaaagtacaaattctcctcatcacactcctgacctaattttaacaagttgccaaatactgagtctcaggcctacagtgtgctttaagatataattcctaagggcagcattctttgatcaatcctcttgtaaagtcacacagttgaagacgatccctacctgctggtgtttctgtgtcacagctcttctccctctgccccatggttcccagcagtgtacatgctaaacatatccttagttgtccccttttggctgctcataggtttgaagctaggctgtctgtggggaagggagtgtggagctgcagaggggaaacgagatacctgtttggcttccactggcttgaaaactgagtcatgagtccatagtacagaggtaatgtgaacaagtctttgcaaatcactgcatcagtaagccgtttgcccccaccccttacacacccttttctcacccgttgtatggccagcccctctcttggttccatttagactacctaacctccgttggcaaaatctgcccttttcctaccacctcattattctctggccacctgccaaccacgtgagggcgatttgaacactgctgaaagcaggccagcacatggagtccttagagacgctgtcatgtagtcatgaccgtgaggaagcatgtctcctggaactgtgggtcacgtcactccaccgttgtcatatttcactttaccatcgcaggggttttgtgcatttcttccaattcccatgactctggtttcacatgaggtcgtggacttctcaatcaaaaagttgctcatagctttggtaggtctgaaatttcagagtattgagcaaggcccgcattgtgctagaacatgatctaataagattggactgtcaaaacaagaagcagcagtctggctaaaaggtttttaagcaggaaatctgtcctgtgagaacctccaaaagatgataaacatgtaggctgggggccgatttcattttcatctctaccatgaacttaagcagactgaagtagaggcagaaaccgtagatgctatcttttggttgggaaactaattggttgtgtaattagctgtgtgaaacatcaggaaaatatgtgaaccattttgttaggaccctacagagtacttgggacagagccccaaaatgtcaagtagagacgatgcgtcactcagagtgcagtcggagagcagggagttcctttccagcccaccaaccgtgagaggcggcaagttatgtaaccttttccgctccttggtcttttcatccctgacatgagaattgggacattataagatgttcacgggggataaaaggaataatctggagcagtgcctggagctggaggagtggccagtaagcgagagcagtgactggtaggtacatcgcaagtatgcttgtgcattctgatctcagcacagtttccaaaagaagatcggctggtatcttagttttctgctctttgtggctcctcactagtggaaccctgtgaagggaaacatcttgtcattctctgcaccattctcttgtcaagagcacatctcagtgaaggctcaggtcaggatggccctggcgatgagtcactgtagttcactttggcctcctcctgaagcccacttttataattttccagttcaattattaagacactgaatatctgcatcatactactgctggattgcaatgtaaccactaaccaagcatgtttatgcaatgccttatgtgtaatcacttataataaaagtaaaagccgggtgtggtggtgcacgcatttaatcccagcacttgggaggcagaggcaggtggatttctgagttcgaagccagcctggtctacaaagtgagttccagaccagccagggctatacagagaaaccctgtctcgaaaaaccattaaaaaataaaaaataaaaataaataaataaaagtaaagagtatggcttagtgatggcttcatattggctaaaggggaaagcccgcgccgtctctcagcatgttagattaatccctgcagtggaaactagattgattctgacagagtagctggaagtctagtcagctgcctgcttgcttcctccttgctgccgttgtgtaatgggcaaaggtgtgctctggggaccactgaggcatttggttttgcccctggcagaggacttggatctgattcccagcagcagcagccgcagcagcagcagcaaaagcggcaatccctttcctctgccgagtcattgccagctaaggaaacaactgtcctcaagtgctgcgtgggatcagacaccagagagaaagaaatcccgttagctcatttaattaattgttttacttaaaacccaagctgggaagaaggaaaagaaatctcagtctgtgaagtccttcattgcaaatgcggggaccagtatcgggtccccagctcccatgtagtcagacatggtggcacaagcttagggtcccagtgctgaaggggtagaaatgtgatctttcaagctcagttgtcaggctgccctatgccaagaacatcacaccgaagtctatctcctggcctctgcaaacatggacactccgccctcacacaggcatataccagcacacgcaaatgtgcacgtatacacaatacatataagtaaaaaataaggcccaggggcagttgggaccagatcacacctttaatcccagcaatggagagacagaggccggtattctctgcgattttgaggctagccttgtctacatagggtattccaagacagagttacatggtgagaccctgtgtttaaaagaaaagaaaggaaggaaaagaaagaagaaattaaaaggaagccccaaatcagtataaaatccgagaatttatgtttcagtttccttatctagctctccaaagaaaagggtcccactgtcgtcgtcccccccccctcagtctttggaaaatacacagataataaaaacatcaacttgggaccagacaaatagctcatcagttaaaggcacacactactggaaaaggacctgactgttccctgcacctgtgtccggcagctcacagcaatgctcactctggctcccagtgatctgaaacccacttgtgcactccccggcatcagcactcagccatgtacatgcgcacacatacacacatcattcaaaataacctttaaaacaaaacttgttccacatagtttatgatgtcaccagggattcttgatgaggttgtcagcctgtgtgtaccgttctgttactaagccctgcttttttcgggggtgttgtgcaatatgtcaacacttcccgtttctttcctgtaaactgcagcttttctggtgattagtattcatcgtcttttcctggttatgggattgtcagctgcagtcttgagggagttccctgcctgctttggaaacaatctgaagagctgaatgtgttacttggaaattaagaaatttggaagcattcatgggaacccaaacggtaaaacaatcaagagatggttatgatcttgaaaatcagataatgataggataacagaaggaataatctcagcctttctaaaagcttcctgaaacgtttaatggacacgtgtgtccctgccccatgcttttcaaaggatggatgttcttgttctatctcaggagctgggcaagttgtgatgcttcagttccatccctcagagaaccctgactaatgcacatggccactgcagatgcttcagatgtggctttgtaacttagtgccttgaattacccagggttaacgaactctatcttctaaatcccttctacagccatggtgccgacacacatcagtgacaccttgtcgtggtagaagatgggctaggcaaaggcaaaagtactgttttcagggcaaggagtatgcagtaagcagctttctgcccggggccagatgggttgggacagtcgggagactgctgatataatgaagaacaaggggcctgttaaagggtggaagaaaagtttctcagggagtgacttcaaactgaaccagaagagagcaagacaaatagaacgcagagagtccagcaagtgcagaggacggaatgaagcacatgtaaagacccgggggcatgtggtgtctgagcagcagtacgaaggcagatggagctgggatatagagagaggtagaactaagccctgattgtaaggaaaccaagctctgctaaaaagtcaattacagggaggaaacagtgaagaattggctttatttataatttttcagaattaacctagttctctattatttctcctttaattttgggtactggggatagaaccccaggccagactgtggtaggctctttcagccctggttgcctttcctttatagagtgtaatagaatttcattgcatagctcaggctgctccttcaaatacatgatcctcctgtctcagcctcctgagtgctgggaatacagtcctaaatgtgtaaaaccttgaacgaaagcttgtgtgcccaatctgagccttcaatgcccttgtcacatccccagcaccacacaatgcagagacatctcttcacccccactctcagctccttgtgccttagactatccccaagaacttccctgggccccacgttcctctgtggacaaaggagacatcctggtgaaaaaggagaatgtataatgaaagctcttgatcggtgagtagaagttggctttgcagaataaattgaagagtcagagaaagtcagctactggaggtgagatgcagtctaccgttcagtagcagcagcgctcctgatgcacacccttcctctccgcttccaccccccaggtcctcctggcccccagagtaagcagctacagatcatacagggattgcatggtagcgacctgagataaagggaagtaagaatagcttgtggtcttcaaagaccggtaatcaaataaggtggaaacatgcagagatgggaattgcatgcatgaaggtgataatttgttcaaaataatatagcaaccagaagcaaagtctttaatgcctaagtgaatatggaagcatttggccaattcctgcccaccattaaaagcttatgcaaagcccataaatcagaaatatgctctttagacttgcagtttcctttctgggagctttgcatttttcgacttgtgactactccctgaaaacaaccaagggcaagtgctggtggcatgccagtctggttccccccacccccccaccccagaagtcgggttggtgattctggaagtgagagtcttttgccatggtaaatactatgtctgggcccacagacaagcattccatacatggatttcatttgctgtgcaccattgcctagcagttctgtgtactgttggtgatgcagcaggcaactaagggtcagggcatggcaaaggataagaagcctgtcctagaagtgtgagtgaagcagaggtgtggaagaaacggcaggagaggagctgggtccagggaaggggggggggggaaggaaggcctctgaatgaggggttcatgggagaagttatgctaaggcacaggcagccacaggagctgacagcagaagacctcatctctagcttttcacatgtgactagaatctatcttcactctctcatttcctgttgtggggggggggcggtgcagagggaagggatgtcacatgtctgactcaaggctaaggatggatggcactgtggaggattagagaatgtgagcctttggtggcagaccaatcctgtgtaagctgtagattcaggagctacatggcctcaggcatttcctcttcctccatatccagtgtctactgtcaaggtgagacagcatcctctttaatgctccaggatgacatggacggtgtggaacatagtcaggagctgagttgtgagtcacaggccgaggctgcttcaacttttccacctgagactcttcctctcgagagtttaactggaaaccaggtactatctgggtatgtaaggtaggcataggaactattcacaggccgaaagcatacacatacagtcttaccatttattaaagatgaaattaatttgcatactgaccagatggatttgcttgtttccttttatataaagatgggatcttggctgagtgtagaacacctttagcatttttcagagctgaatcaaacattccaacacaatgtaatccaaagaatgctaacttgatactcactgaggaatgacagtgggaaaatagggaaaacctttgttgtcagtaatgaaacctttgtgtttcctataagagcagaagaacaaagcagttactaacagagccatgaggaatctgagtcaggctgctgcaggcagcactcgttggcattgcacagtatgacagtagggtccagtacacagtttgagtgttacatcgttagtacccaggttgctgtgaagtcacgggggtaacacaagcaggcactgccagaaactcgaaaactctttcacgtcgtgtggaattttgaagaagtggtcattggatgttcagaagcttgtcaccattgccagttgttttagtaggccccatatcagtcatgtgaccccatgtggtgtctggactagacctgttttcacatcaccttgcttccatgtgttagctaagtcattttgtagtcaggagcctccgtattcccatctatacaatggcagaataagtgtctatggtcattccagaactcagctaattcttgagaggtgcttggtggcacagtgttgggccatgtggtcagtaacaaatgttattagctccctacctcctttctcaattgcagagctggtctgaacgttccataggctaaggagatgttgaggtatacaatttcagggcccttggtagtttagtcattgtcctttgctaagctgcattttccctggaggctgtgcccttcaggctcagctgcctacactcacttcccttcatcctagctttgttcacatgctgggctgatgatgacaaatgccccatcacgtccagacaagcaggtcaatggcacactcccctcagactctggtctcctcacttgaggtttctgccttcaatagcacacacttaggctcagtataacgtactgctgtggaaagcatacaacaaatgcctcttctcgctgccttctcgggaaaacagtactaataaaaagcagccgggcagcgacatgaagaagtgcgcgactgagcagaaagtctgctcccgacacatttgcagcactgaaggtgtgtgctgctcagccagagacaggacacctaagtgttcaggacgcccaggctcagggactaattaggtattagttaggacagccatcaggtcttagtaactgtcatttcttcacacactgcctccaccatcctaccaaactttaaatacctgaggaaaaaattctgatggtcttgtttattaaacctaagtcagctgcccatcagagatatcgatccatgtattggcctgaatgcagcctagcagcgctgatgatagtaaaagaacaagcaggaagactgttttattgtaatttggggaataagcccctgttgattcatatacacatgtgcatctaagctgtggaaagcccagaagccatatagaaatagatggatattgtgatgattttaaggttattcattacaaaagccaacaccctgaagaaagtcagatcagctatcagctggagagaggcgggggattgtgattcaactgcagaatgtccgtttcctgcacaaaccttagaagtcagttcagataggacaaaccaacttatacaaagtcaaaggacataaatgggctgttccagaaaaggcatccccaatcatcagtaagcatatagatgttaaaacacttgtaagtaaaatgcgcctgtcctttaaaactacaatagcaagttaaatatttcaactaggcatgctagtatatgcctatcttcccaaaacttggaagcaggtacaagatgatcaggagttcaaggccaaccccagctatgtagtgagttcaagtcttatccaggctgtatcaaaagtaaatgagcaaaacaacaagtgattgagtgaacagatgcatacatactcatgggaccatgggtctatgtccagtgatgttgacttcagcatctgatatatcagccaactagaagctggaggcttcggttcaggatgaactgacaggaaccacaagtacaagcggaaaccatggaaggcaagcagggcaaaattcataaaacccaagccaggatacgatgtcatgagtccagtgaaaccctgctgcattgtcctgagagtttccagctactgggaagacaggcgagctaagcagccccgtgctgtccttgtgtggaaatcatttggaaacaaagatagctaaactagtattcgagaactgcccaagacacaaatctagatctccagagggatctcgtgtccccaagccttcagtgaaggaccaaggacacacacgtgaggaaacctcccaaagtggagaacttgtccaagaggagagggctatggagttcaagtgtagggtcacgtgattagtgtgtgtgaagactaacgctaaaggaaaaccaaaccagaaaactggcaaagaactgctgaggtagagcggtgcctgggactcatagtgatgatgggacaagtgtgtgtgcccctttcagccagacgggggacaaataacagataaaagtcattagtcggtctcaatagagctggtcactcaggccggtaatcccagccacacagagtgctgaaatagaaggatcctaagtacaagggcctgagcaacttagcaagaccctgtctcaaaatacaaactaggttaggctagtgctgcagatgcaggtcggtggtgacatgcttgctgcgccagctaggcagatagatccctgtgctgctatggagagatggataaagagtccgcagaaaaatcaagagctaaccagcctggcatatacagccaggaacaaaagagaaaccctgtcccaagcaaggtggaaggtgaagcctgcccaaccaccaaggactgccttctgacctttgcatgtgcctcaaaacaagcctatgtactcatagatacatacatatgtactcacacacacagaagcacatatgtacatgaagacaacacacacaaggcattcctcctattttcaaccagagaagagattgcctatattacataggaaaaaacaggagactgaaaaacagataggcagccaacccaaattaaactaggaataaaacctatatgacaacagtaataaagtataacttaattatataatttaaaataaatcagagacttgagaggctctttggtggttaaaaagcacatactgctcttccagaggacctgagtttggttcccagcacccatgtccatctgtaacttcaggtccagggtataaacacacacacatacatacacaaataaagtaaaatagggcaaaccactgggtaaaattagtgacaacttagacattttagggttttgtttttttttttttttatgaaaaataatgtgtgtagccaggcagtggtggtgcacactttagtcccagaactcaggaggcggaagcaggtggatctttgtgagttcgaggccagcctggtctgctttgtgagttgcagaacagccagctctacgcatatgatattaaaaatgggtaatataaactgcacaactcaattctacaacaaaatattcttgctaataaccctatagagaaaacaaatggaatcaagaagaaatatttaaacgttgctttaagagtggagagtaaagaatgggaacaaggtcgggcataatggcacatgtctaaaagtattctagttctcaggagagcctcagggggcagatcaggtttggggccagcctgatttacagcttcaggccaaccaagattaaagtgaaaaattgtctcaaaagaaagaagaatggtattcttgaccccagccatattatagcaggcctaacagttaaaagacagttgtcatcctagataacaaagcaagactgctatatactatatatagagtctagtttttcgagacagggtttctctgtgtagcccttggctgtcctggaattactttgtagaccaggctggccttgtactcagaaatccacctgcctctgcctcccaagtgctgggattgaaggtgtgcaccaccacgcccggctcacagagtctctattaaatataaaacacaaggttaaaagaacataagagcactgtgtacacagttacagagatttcaacagttggtcgctacagtggaattacatttgaagttaacagaaaactattcggaaatttccccatacttgggaaatagtcagctcccctcgtcacctgagggtttattctccacagttttaaagtaataaatacaaatagaggcagggcaagcggatctctgtgagttcaaagccatccttagctacaaagcaagttccaggacacccaggactacacaaagaaagacctgaaggggtaaacataaccaacaggaaacgaagttagattcttacctgactttgagacttacaaagcagtaatagccacaacagtgtagtataagaagcaacattttagaaggcctgtgaaacattttcaaatccaaaatagacattcagaggcagccagttaattctccacaaatgtataaggagaattcaaggatttttcacaagtatgagacacagctcactgagaaaggaataattctctcaacaaatgatagtgtatcaactggatatacatacacagaaagtaaattttgagaactggcaagatagctctgtgggtacaggcgcctgcagctaacctgaattcagtccctgcatcccacatgggagaatgaaaagagtgagagaaacatcagctacaagttatcctgcaacctccctaggtctgctggggcaagcgtacacagtgcatgtacacacacgcacacacacagacttgtagtttaaacggcgtatatttcatactatatataagttaatttgaaatgggttgtatgtcttaaaaatataaaatatcatatatatacacacacacatgtatacatacatacatacttacatacatacatactcatctaaattctgttctttagcaggagtgaaggaaccagtgatgaactagagaatgctattttggggggctggagacatggctcagtggtaaagagcactgactgctcttccagaggtcctgagttcaaatcccagcaaccacatggtggctcacaaccatctgtaacaagagaatgctattttttatgacgaaatataacattttgtatcaacaacataaaatgaactctagaagttcactaagaaaataatctaaaaaggtttttttcaagaaagattttcaaaaggtcttgaaatacacaaaaatattcaacagctacttcaaaactagatatacagctgacaagcccataactctttggtcagtacagaaatacagattaaaaccactttacacatacgagggtgcttaaagttttgaaaacaacataagctgttgatcataccaagtgttggcaaagcagtggagctagggaggccgaccgcctcttgcctggggtgaaaatattggctgatgtgaatgctttaggaagcaattcaggagtctctttcaaagtcaggcataccatagactgcatgagcaggtaatccttctccagggtgtttagttagagcattggatgcgtgtgtcataggaagactcctgcactaatgcccacagcagctttgattgtaattgttcagagttggaaaacccagacaccccacaacttatggctgtctgtatacatgctcagtggcatgcctattagagagaatgcagtactgcccagagaacagaaacgaccagactttgatacatacagcaaagaccaaaggagaacacatgctatatggttccactttgataaaattctttaccatgcaaattgacctaagtgactgaagtcagttgctgccttggaggccagtgggagccagaggtgcagaagtgggtaattacaaaggacacaaggaaactctagggtgagggctttggtccctattttgattgtgatgttgcatggctgtatacacctgtcagacgtaccaagctcagtcctttgtagaccagccatgcctcattaaaggggaggatggtagctgcttagctgctcattgttagggattaactcagtgaattccagaaggctacagaacagaacattatgcaactgagttttaaaaggaagttaatctgtgtgtccaatataaaatgatcccacaaataaattaataattgtgaaatacaaggtgcaaaataatgtatgttgagccatgcatgttagccagggtttaaaaggctgaagcaagaggctcacaagttcaaagccatcctatgctacatagcctctctcaaaacaaagcattatatattaacctttaagtaaaaatgagtttgtatgtatatgtgtaacacacacacacacacacacatatatatatatgtgtatatatatatatatatacacacacacacacatatatatatatatatatatatatatattgtattgcatatacatagcagtgtgtgtaagggatacatttatatctaagagtaggattctgccccccttagattagggtgttccattcactttgttgatttttttttttcctgatatgctaagaatcaagtacaagggcttgcctgccagacaggagctctgccactaacctataccctcaacatgaggttagttgtatatatttgtaaattatacacacatgtatatgccacatccatatatgtgtgtgtatgtatgttcttttgtacatgcaaaaagaaaactgattacaaaggtacagaaagaggaaaaaagaagagaaagcaaaatggcagttttccatttaattgtaactgtcaattgaaaaaatatataattgacgtataagccaggtctgagagatggctccaccattaagagcacccatattgtatcccatggctgcctttaactccaggtccacccacaaacacatggcatacatagacacatacatgtgaaaaactttttttagacaaatagaattgattttgttgagcaaacttggagttccagcattggggaggctaaagcaggagggtctgaactttgaggctagcctaggctagacactagctccacaataaataaataaacaaacaaacaaataactgtccaagaacacattgacatacacaagaaactatcgtaagtatgagtgaggtttttctacatttctagaaactcctggactgggagggtaactggcctccaccagcttagtatgtgcaaggcctttgttcagtctccacaaccataaaagagcaaaggtgtttgctttaatggaacttaacctttgagagaatcacactggccattttccacattacagtctatgggcacatttaagtggagacactgtggtgggtagtgatggcatatgcctttagtcttggcacctgggagcagaggcaggtagagtgagttcaaggccagcctagcctaccgaggccactccagggcagccaaagctacacagagaaaccctagctcaaaaaaccaagtttaaaaagggaagaaaattaaaaacaaaaagagacattatcctgccacgtgtgacaacacacacctttaatcacagcacttgggaagcagaagcaagaggggctctgagtttgggggcagcctggtctacatagtaagttccaggatagccttgttaggagaaaggagtaactatacagctctgtgcatttcctccttccttcagacttctcaggagaatcagaactgtatccaatcaatggcagaattgtaaccctgacttatgaaacctcatgttgctcccatctttggaagagattactcagtcctccttcacaggatcttgtcacggtgaaagatgggtggggttaagtgaaatagtctttgtttcaggattcgtttccatgtctcaccagattccagcaggagcagaataagtgttagaataaggtggggctctctgaatttactgtaaagactggagcacccgagagtctgggttggggtttgtggcagtgtagcgagtatcttatgcacactactgagcttggctgctcagtcctgatgctttgggaactcactatgatgccagaggcagggggcaaggagcagccctcctgtgagaccatgacccacattcttccaaaaacggccctggtcacaggccaggttaggggttgagtctccagcatgagtgagtgacgtggtgttcgcagcagcactctcagcctgtgctctaatttaggtcagatgggttccactctctagctcttttattttagtgccaagggaatggcggtcttaaaatgttacagctggaaatagtacctgaggtcatctggtcccaacacacaggaggaagcgtctacagactgcttccatgagcctctattcccacatcgtggtgaccctcctgctcatctgcaggctgtaaaactgggtatgtctgtgtccagaatcacctaggggtatttattacttctaagacaaaggcagccactcttgaatcacatcgaggcattaccaaggtgaggccttagtaaagccctggtctgagcccccatttacatcagcaagtaccctttccttacaggttgtgaaaagtgtgtcctgggaagagttgaaagccttgtacccctgaagctgtctagcctggtatagcagaagcctcagcactcagacaaattcacctctctgtgccccagtccccttatctataatgggaataatatggtagcctgcctcagagaattatgtaacaccttatcaactgaggtatgtatacagcattaattcagctctggatggatgctggacatgatggcacacatctgtagtcccatcactttcaaggcagaagcaagagcctgtcttgttctacacctgagttccatgcctgcctaggcaatacataacaaaagtaggtgggtgtgggagtgtcatagcattgagcagctcagtagactcgtgtgggctgtttcctcacctagagtgcttattgatcatcaagccctcactcgcacggtactgggaagagtaagtactagagtaattgttactcttgccaaagaaccctcctgaaaagccaccagtcacctagaaccccataaccatcagaccactgaggtggggagtttaaaccaaagccaggtgaattaccatgtatgtagggctcctaagcatcaaaccgctgaggtgggagtttggaccaacgacagttgagccaaaggagaggatgtgatggcctaggagtgagtgggaaggggtggctttaaggggaagagaaagaaagacagctctggctaggtgaaaacaggactcactttgggatgcaccatgaagaagtgaagattcactccactgccctcaggaaggaagctagccttggagacccatagctctatgtcatagcatcagaaccacagaccataaacccacctcagaaagatcaacatatcctagacatccaatgggaagcattccttaagctttgaatgttcatcgggtgctaaataaaggagaatttagaacatggcatcaaggagggggaaaccatgtggaacggggtccccaagtagggacaggtagactagagatcttgcgtctccattgactcagctgtagaccagggctagcactaggtgaccgcagctttttcagtttgaatataatgccaagtccactaaaaagcaaaaaagtccacctgttccctttacacattaggctcctgtgtttgtgccatgcactgtggaagtacagccatgcattcgggaagaaaacatagcattgagcagtttggtagactcctgtggccatttccctacctgccaagtgattatctgtccccaggtccttactcgtggcatatgggaaagagtagataatacaaagattgtaaaacactgtcaatgtcaagtactgtgccatagacagagcagccacacaaggcaggaaagcatcgtgagaaagaaaataggcattcttccccgctgtgattttattgttcccaccccccaacccccaccccaccccgagacagggtttctctgtgtagccctggctgtcctggaactcactttgtagaccaggctggcctcctgcctctgcctaggattaaaggcgtgcgccaccatgcccggcttgtgattttaaaactatgttctagatttttaacaactaaccatcttgatctgtattttcctgttaattggaactgcccaacacactttggggcagtacctccaacatcagagtgtgatactagaagtcatttcattgttttccagcccaaatctttttgcaaagaacttgagacaagcttgtttcatctccagttccaatcactagccgtgtgattgcatgtatagggtggaagagccaaggttagagcggcacacaggaaatccagactcggctgcttctaagctccagtcagctgcagctctgggacaaatcagagttgcagactttattgagaagaccaaagctgctgtgtggacttaatctgcttaatttccccaacaatagatataaaactaactgcaaggtcacacagaggaggaagttatctagagtctgcagtttagtgtcttgtccagtgtgtctacattctcctaagtaaagcaacttgatatgtctggaaagggtatgtttctgtctccactttatatatgcttagaaaattggcagatttgatataagccttcatattcacagatatcctagaaatatctaccataagtctatccgctattaaggtcacagtaataggattgtatggtttgtagaattaaatatgcttagctttggcctgctctgaggtttccagttttcaaaaaaacatgagagaaagcactagcatcagcgttgtctccattaaattagataatttgcagactatgcatagcagagtgctggctttcagtgcatcatagctcgcattacagaacaggttcttagtctgattagactttcactgaatagttaagctcttgataagagaatccagatgaacaggtagtgtttcgctgttggttagttggctggttttgcatttactctttatcgtgggaggcttgtgcatgctgtgttacatacaggagtttagaagacagcatgtagggttccgttgtctcctccaaacttggagtcctatggttcaaacatagttcaccaagcttggtgcaggtatctttatctgctgaacatctcaccggtcctgtttttgtctcagatcgggtcttgctatgtaatcttggctgaccgggtactttctgtgtagcccaccctggcctcaaacccacagcagtcctcttgccccctcactctgccacatgcagccaccgtgcccattttagaagaatccccatgtgctggagagcaggcctctgcctggcctgtgccttctgtgttcctggttggtaagtaatgggtgttcaggaaggagctgcttgctgcacttgagcttgggtttctgtcaaaaggagattgcctcttcagtgaacccttgagtcttacgaaccagtccttgatttcaaaatttcttttgagttctcatgaatgtggtgagctaccatgcagtgtacttggaaacagtccagtttggttctaaagagagaagggaagaggaagggcggaagaccatgtcatctaattggtttgggaccttggaagagacaggattgtctgaggggagcaccaggtggagaatccagtatcctacacactgctgccagcagcacttgctcctgagagggaaccatacaggaaacacatcatcctgtgcccatgccaggccatcagagtcaaagccctaggagtaggggaccgaggcgtctttgtagtttagtttgccaggtttagggagcattgccacagccgttttccaggcccaggaagagaaagcaattccctgagtcactcccagggctagtcagtgaccaaggccagccttaggttcagaagacactcggccagtacagggtcttcccaggttatcccagcccctggttctctactggctgaagagcagaggcaaacgcttctctctctgtgctatcgagagctgcctgaccttaaagggccactgtggggtcaagctagttaaaagatgttctgttctgttcaccgtgtcctttactcacagtctgttctgcagacaactgaaaggctgctaaattaagccatttttcagagaggtctgagtcatctagtggcagctgtcggtgcctcgctggaggtgctttgatcattgttgtctaaatgcacacattagtcctgggcagcagtgtgttgtgctgtgctagggacttactgagataatgggctcagcccttgaggacatcaaggaaagccaaaggctcatgagtttctctcagggcaagaaaaggcatggaagccacatattttagcaccaacaatctagtctctcggctaggaaaagcttgaatgtatcctgcctgcccagttaatatagagaagggaagtacctcactcagatcacatgggaattcaggagcagatggcaggacacagcagaacagaattggtttcctcaagggagtttcctctattcaatcaggaaggctttcattaagagttgtcatttcaaggacatctggaaatgaggtctgagaagccagtccaaagcacagtgaccatgggcatatgtttgagaagagtggtgtacaaaagaagaaaaaaaatgcattaacctgttataaagcagtgtgtataactgatttagagcacgggggtggggggtggatgggtggggaggagtcagagtaggaatctgaagaggccagaagtcaccaaacagttgccaacgacagcattctcatgggtcttactgacatgactaggtggtcgaaagtggttcaggggggttaaagtcactgccaccattcctgaacagccatttcatgccatgtctagcatattgcataaaatgtctttttccttagaacagcttttcagacaggtgttttcctccaagccagtgttcctgtgccagtgaatgcccactcagacttgggtggctttcttaaaagcacagggcgttcgggagacagagttcatacttgttggttccttccttgaggcctctctcagggtattgagggggaatgttagggagagccataggagatcaccgaaagcttctatctaggcctgcaaacaaaaggggataaaatggtagctgtgggtggggtcatacatttctgattagaaagagcaagaaaataatgcaagtttttgccattgcctcaccgatgcttaaggaagaacaaattgaccggaagttacttacttggcagtgattgacctggtgacatgacccatcgagttagaaaaaaggaaggctcctcaagaagaaagatgtcacataataagctttactggtgagttggagtgtttaacgttgcaatgcccaacaaaagatgaaaggtaaaagcagattaatatgttgatgtgtcctctcaatagatgatagcacagcatcctgtgacctagggtctcacaaaatctgccacaggcctgtgtgcatcgggcactggaataagatggtagatcacggatgtgagaggatacagctaggaatggaaagatcgaaaactccgggaagctgtgtgctatcatgccagccttgcactggagggagagcaggggaattaagtctggcagggcccagggtcctgtaagaatggatcattaattttttttaaagatgagaaaggaggcttttaggcaggaagcacagtaaacacatctcgtatcctagaatccaaggaagagggggagaagaaggacttagctgtgctgactacattggtcagtcattcattaagttataaattagtttaaatcttttcagtagacctgccaattaagcatcccacttacacatgaagaaaaggggcacggagtgcagagatgggcagggaacaggtaggattttcccaggcctgactctgaaccatggcttccatgcccctactgcctcggctagactggagagcagtaaggaagacttgacagggacagagccagaagctgtgaacagaccagggccagcgtctgagaaccagggagcctgaggtcttgatggtgcagaggtgacatggccaaagctggccacaaggattggcctcacgtccctttgccgtgtgtggcattgtgctgcccagtgtgtggacgagtgaatattcgtcacctgggaatgatgggaatgagtctcctctccccaaactagtactttgtagccattgtgtctggaaatgtcccatgtgacaaccccatatcctgtctgtttaccctttcctttccagtgacatgggatacccactgttgataaactgtgacttagtgtgaatcactaatcatgtaattggtagaaaacaattacctttgacaaaactaggttacctgtgtgagatctttgtactcttgaggtgagaagagtcagatgggtagaggtttggctctaggagtaggctaaagggcttcacctcgctgggagcataggtcctagcccctggattaagtcgtgctcttactgctgacttacaaccctgctccccctcctgtaggggacatgtctaaacataattcctctctgttgtccactggctcctgtaacacagtttccagaatgttaggaatagccacattgcacctacatgctgtacttgggtaactacttctgttgctcaacctacttaatattggtcacagtgaaacatgttttcatcacttgagatccaaattttatttgccaggttactaatggccatttacttctgtaacataaattaggatgttgtgcaagattagcttgccagcaggttgactcttgaaatcccaggcttcccatgggctcagtgtaaggagctgtttgagtggacttagccaaatacccacaaaaaattttgtctgcttttttttttttttttaagatggtctgatggtgagtataaaggatttaagactggagtgggtttggagagtctggagtccgccctcctgccggtctcatgatttacttttcacattggagaagaaacagagtgaagagcagagcgcagtggacataccttcccaggtcacaaagccattgaggtcagggctttcaggtccttgtacttgtccctctagcttgctgccagtaaaggctgtctaacccaaaggctatctgttgttgctgttggaccaagacagggaagcaaaacctgcttgtaaggtaaaggctctggagaatagtttctatacactagggtcaacagaagccacgtttcctactgcaggagctcccaaagccccctcagcttgaattttctcctcacttagcttttgaaaagccaggttcccttttcacttagaatgaaagccttgcttgttctgacaacagcatgtaaatctctattgcattgaaactcccaagtgcagtcaaagcccagcgatgatcacttctgacttcattagcaatggcagtgagcattttaccagagccatgaaggtgatatggaaaagaaagggcaagttagcaattgcatagttatatagttaacacggtatgagatcaaagcctgccttataatatcctgagtgctgcagacttcctgcgcctgccttcagactgtctatcctttctaaatacagtgcctgtcgtcagtaatggggttttagattaattttactccagcagtaataagtagtatgtgctgagaagtgagggccacggaaatgtttgtgatagggcatcatgtggcttcagacgccttgggatctgaattcagaaaaagggttttacaaagatcccacaaaaaggtggcatctacagctctagactgagattcacaattgacttgatggtcaaggatgagcggacaggctgggagaacacagagtacctagtcccaagattggactgaccctggggaaatcttgtcagaatgttgtgtgtaactcccaagcagaggtacattttagatggcacctggtacccggctgctgtggagtctccagcagtgtctggtttccttctggtttgcctgccgtcctatccatgccatgacttgtctcccccagcctcagatgtctcccaatgctttcccttgagcccctacgatgcttagtggcctttcctcccaggagtcttgctagagttcacaggacacatgccacacgttgtcacggcaccgtctgtcccaacacaaggcagcgaactcttgtcttacttagtgtttgcagggcctctcaagagtgtcaggaacttatctcagcagggatgtgaggaaggaaaccagcatgtttctgtgtgctgacattctaagggcatttgaagaatcagtggtgagaaaaatctctcagatgctttggttgctgatgtaatgaacaccagggctttgtacacatcatgggagtgactgtccttgtacccatcgtgaaaaatgttagggtggcagcgcctgccccacaggtttccctgcactcactcagctcagctccttttcccttgggtaactcccagcatgcattactgtcccttctgtcatcactatctgaggcctcccagaatgctccccacttcctgtgtgctccccatactgtgctgtaccacaagatgccttccctgcctggctcagccctgccttctgcgcctacacagttgccacatgaaaattgcatgaatcatatcttgggttcctaaatgaggaaaagaaaaatcagttttctttaggtttttcttgaccatctttctggtttagtcttggttatcggttcacagagagactactccaagatgccatgataaaattagactaaatgctgagccaggcacgatgccacatgcccatcatttcagtagtggggagactgaggcaggagttcaaggtcagccccaaatatgtggtaaattcacaaccagccttgacaagaccctgtctgaagaaagaaaaaaagaaagacagagaaaactgataactctgcaacgcctctcagcatggttgactgggttgaattccatctcagtattaattctcgaaaataaaactgtattttaagattcttcatctgcggctctgccatccatgagaccgtgtttgactgttctattctttctgctttgatctccttagcagctgaatcagacttttggaatgagacagtcatggacttcttcatcattagttcttttttttttttccttttactatttaatttagaattagagcaagatgataaaattagatacaagaggcctctgtgtgtcatcaagtaacctagcctactttggataacagaaataaattcgccttaaatacttgccagcttgtttgggccaacgttgttaagatgaatggcctttcagtcggtgctgtgtgagaagccatctctccctaagagttcttcctgacaattaaaatttccctcttcttaatttcattccagcgctcctaattatgaccctgtaattagcgtgctgattacatccctgtgcaatttctctgcctccttgatgttcacccttcatttatttttagtgtgcttcttctcttggcttctgaagcccctgcctacctgtcccccacggggcttctagctcagggctcagggaagcaagggaagcttgccccatcacctccagttgcccctccagatttacttgtttttgtcatgaacaccatgcgttatagctgacaaagagaattgcactctggggaactggagagctatggtatagccttgtccctctaccatgtggggggtgtctactcattgctgcatcagaatgatccagatctcccccaacactccattaggaattactcgcctgtgctcggcaccattacatcctcatagtggcagttacctggaatcttcatggagttcctgaagcaaattcttgggagctttctcttcacactttctctttccttccttccattttctcatacccacttaccagcaggctgtccactcaacagcaatactgtcttctgtggtgtaggaccacaggcacccagatttaagagttagacacccacaggtttgaagacagaaagacacaccagccagtcagcctcttttttgagaaaccgtccccagagtcctcgtgctttgttttgttttgttttgttttgttttgttttgttttgtttttctggctttgctgctacttcatccatttactgggtcccacactcctccttgttagagggtaaggtgttttacttcgtcttcagagtcgcctaatgagatggagaagaaagcacacacaggaaacacccattcaaagttggtggcagaggcagccagtggttctggggcctggactcagcaccctcactcccaacccctcacgccccaagtgtatgcctacaggaaatgtgactcttctctgcacaagacctatagaatgagcagagcatctggaagccaccaaggaccctgtaagggtacagtccacatcctgccacagagctcctgtctgggtaccatcccagggaatttaaagatgagtaaaagctggccctgccctcgagaagcttacagggttagtggtaaaacagtggcataaagactgaaggatgtgtttacctgcctccagtagaagatggtggtctccagaggactcctgagtgcgttctccagagaaggcagagccctctgctctctggacccctcttgcttccttctgtgcagcataggcaaggcctgtagacattacagcctctgttgatgctgctgctatgttcccgtgcttgcctccactatcatcacctgtctggaatatgtaggctttcagtggtcaggtttgctctccctgacgtttctcgaaatgagttgggaaaagatcaaatgttccgtgctaagcatattgggaagccccgtgaaagtaaagaagttttagtgtgacttcttcatgtttacaaaatgaacaaatgactcacatctgttgtatacattcaccagagccatgtccttagctgatccttactatgaagtcctgtgtcgtactgtgcatgtgaggaagggtttaaaaggctggggagtgggggtggggtcgaggaaagtcttagggacaagggctgagtttaggaagcttcatcactgggtgctttcgggagttcttcagtcgatcaccctcgtgtgcttcttcctccctctgctttctctctctgactttgattttatctcatccattctgtcagctgaagtctcccttcaggaaggatgttggttgttagactaacttcagacagagccatgcaaacgaaaggcatggtctgggtggtacgttagcgtaggaggtcctgccctgatggcctggccacttggtcatcagaagccaacccatctgtgggtagctttgctgacatgacggtgacggtgttgttaagcctcagtggatttgtaccctcaagctttgacattttaaaatttcttcctaggctaaccaatgccagcactctcaacggcagaggcaggcagaacttggctaaaaatataaaaataaaaactttcttccgtaataaatatgctttgggagttcatctcctggctttaaaaagaaaaaaaatgtaagcacattgctatacaataaagaagttgggggtttggttggttgtttttggtttgcttattttgtttatattttatgaggggttgttttgagacaactttactgtgtagcccaggctaacctcaaactcttttttttttaatatgtgtgttttaagtttatgcatacaatgtatatgtacgcctggttctgtgggagctcataaaggggcactggctcctcctagaactggagttcggaaccaccataggttctgggtctaacctggcttgtttgcaaaagcaacaactgttcacatcttgctcttcctgcctcggcctattgagtgctgggattacaagcatgtttgttgaaatagtgtctcatatgtagcccaggctggcctcagacctgtagcaatcctcctgtttcagctatcaaagtgctgggattataggtgtgagccactacacatgactcaaaaatcagccttgttttgttttgtttcaagacaaggtttctctgtgtagccctagctatcctggaagtcactctgtagaccaggctggccttgaattcagaaatctgcctgcctctgcctcccaagtgctgggattaaaggtgtgcgctacactgcctggcttcaaaaatcagtcttaacactctttagcaaaaaggtataaaaatcttgctggcatatgcaatagtgtctgcgtttggtggctgattatgggatggacccccaggtttgctgaaaggacccagatatagctgtctcatgtgaggctgtgccagtgcctggcaaatacagaagtggatgctcacagtcatctataggatggaacacagggcccccaatggaggagctagagaaagtacccaaggagccgaaggggtctgcaaccctataggtggaacaacaatatgaactaaccagtacccccagagcgtgtgtctctagctgcatatgtagcagaagatggcctaatcagccatcactgggaagagaggccccttggtattgcaaactttatatgccctggtacaggggaacgccagggccaagaagtggaagtgagtgggtaggggagcagggcggggggagggtataggggacttttgggatagcatttgaaatgtaaataaagaaaatatctaataaatttttttttaggtattaaagggaaacatgaaataaatggggctgaagagacagttcagtgactgagagcactcatcacttttttattagatattttcttcatttannnnnnnnnnnnnnnnnnnntcctataccctccccatgccctgctcctcaacccacccactccagcttcctggccctggcattccctatactggggcatagaatcttagcaagaccaaggacctctcctcccattgatgctgactaggtcatcctctgctacatatgcagctagagacacgagctctgggggtactggttagttcatattgttgttcctcctatagggttgcagaccccttcagctccttcagtactttctctagctcctccattggggaccccgtgttccatccaatagatgactgtgagcatccacttctgtatttgccaggcactgacatagcctcacaggagacaactatatcagggtcctgtcagcaaaatcttgttggcatatgcaatagtatctgggtttggtggggtttttttatgggatggatccccaggtgaggcagtctctggatggtccttccttcagtctcagctccaaactttgtctctgtaactccttccataggtattttgttcccccttctaagaaggaacaaagtatccaccctttggccttccttcttcttgagtttcatgtgttttgcaaattgtatcttgggtattctaagtttctgggctagtagccacttatcagtgagtgcatatcatgtgagttcttttgtgattgggttacctcactcaggatgataccctccagatccatccatttgcctaagagtttcataaattcattgtttttaatagctaagtagtactccattgtgtaaatgtaccacattttctgtatccattcttctgttgagggacatctgggttctttccagcttctggctattataaataaggctgctatgaacatagtggagcatgtgttcttataacaagttgtaacatcttctgggtatatgcccaggagtggtattgctggatcttctggtagtactatgtccaattttctgaggaaccaccaaactgatttccagagtggttgtacaagcttgcaatcccaccagcaatggaggagtgttcccttttctccacatcctagccagcatctgctgtcacctgaatttttgatcttagccattctgactgatgtgaggtggaatctcagggttattttgatttgaatttccctgatgattaaggatgttgaacatttttttcaggtgcttctcagccattccggattcctcagttgagaattctttgtttagctctgtagcccatttttttaatcgggttatttgtttttctggagtacagcttcttgagttctttatatatatttgatattagtcccctatcggatttagaattgataactatcttttcccaatctgttggttgcctttttgtcttcttgacagtgtcctttgccttacagaagctttgcaattttgtaaggttcaatttatcaattcttgatcttacagcacaagccattgctgttctgttcaggattttttcccctgtgcccatatcttcaaggcttttccccactttctcctctataaatttcagtgtttctggttttatgtggagttccttgattcacttagacttgagctttgtacaaggagataagaatggatcaatttgcattcttctacatgataaccaccagttgtgtaagcaccattcgttgaaaatgctgtcttttttccactggatggttttagctcctttgtcaaagatcaagtgaccataggtatatgggttcatttccgggccttcaattttattccattgatctatctgtctgtcgctgtaccagtaccatgcagtttttatcacacttgctctgtagtacagggtgaggtcagggatggtgattccaccagaggttctttgtttggttggttttttttttgtttttttttttttttttttggtttttcgagacagggtttctctgtgtagccctggctttcctggaactcactctgtagatcaggctggcctcgaactcagaaatccacctgcctctgcctcctgagtgctgggattaaaggcatgcgctaccaccgcctggccagaggttcttttattgttgaaaatagtttttgctatcctaggttttttgttattccagatgaatttgcaaattgccctttctaactcagtgaagaattgaattggaattttggtggggattatattgaatctgtaaattgcttttggcaagatagccatttttactgtattagtcctgccaatccatgagcatgggagatctttccatctgctgagatcttcttcgatttctttctgcagagacttgaagttcttatacagatctttcacttccttagttagagtcacgccaaggtattttatattatttgtgactattgtgactcatcacttttacagaggacctgggttcaatcccagcacccacatggcagctaacaactaccaataatcccagttgcagggctccggcaccctccaacctctgtgggcacaggcatgcgtgcgagggcaaaataacggcaatcataatagtgttgtaaaggaggcataatcatatatagttactactaaggatctgtggtattcccaagcatcacactgggtatttctgatgacactcagtaaatctgggatcttcaaggaagtgtgtgcctgtcttgctagcctcggaactacactgaacattgacgggtgtgactggctctgccacaagtgtacttctttttttttttttttttatttatttattatatgtaagtacactgtagctgtcttcagacactacagaagagggcgtcagatcttgttacagatggttgtgagccaccatgtggttgctgggatttgaactccggaccttcggaagagcagtcgggtgctcttacccactgagccatctcaccagcccacaagtgtacttcttaactctcttgctgcctgtttcctaaaatacccaccttcagattacgatttatctttcactctgagaagctgtataaaacaaaccatagtattaaggttagctttattcccttcctcaattctggtctgtattgccatttgattggtgttttgcatgttccctcctcatgatgctgctgctggtggtggtggtggtggtggtagctgcctaaacccctgataaggaagcccctgattaaatcccttttctttgtgtctcttcacagcaacaggacagtgactaagacacatgggtgaattgattccttcaaataattaatcaattcaatgatatgaataaaatttcagcatgctatcttataggatagaaaatattaggggctcagatatgttataatcctagtcctcctgaaaattaaaacacagcattcataaagttgagaatttataagtcttggtttcttttctaaacagtttggtctttggacgtcatttcatcctgttttagtttgaccagtggaatgaatgtgaccactgctaccatccatcctaccagcctcgtaactattgcttggtcttatgaagagtctggaaaatctgagaaattattgctgattcccatgctgatggtcaaatttatagtaatcatgtctcctgctcatgatggaccacacatttcatattttctttatgtgtttcctctctgctatttaatttctttttacatttttaatattttaatatgtatttttgagtgcttccgattgggagggtcatatgcatacatcttaatgccagaggacagcttgtggggccagcactcctcttccaccaagtgggtttctgggaattagctcagatgttcaggctggagcccaggagatttgcctcataagggaaaaacgttataagttactatgctgtggcttagttaacctcagtctgccactggggtgggattcaggattagagcatttgcttggtgctacaaagagtaaaaatcctgagcctggaagctgaagagatggcttagtggttactaatacaaacttctcttgcgggggcccaggttcatttcccagtgcctgtgttgggcagctcggaatccctctgacttcagttctaggagggctgctgatgccctcttcttggcctgcactgccatgcacaaacccacatatacacatgcacgtgatttaaaacaatactctttaaatcttctatcaattacccatcttttggtgctcttacactagctcctggcattaagtatcttcagttgtacttttctctgaccttggtagatggaacaaggttaaagcagtcaacatatttataagactgattattgtatgtttctctggatatggatactctggggcaaaagaagagatttttgtaaatacagtatgggatttgtgtaagtacatacactggtgtttactttaaaaatatgacatccaacttttgggcatttgatgttaacagagtggcatgtcatcaagaatatgtagtcatatcgcctgggtggtgtcatatggctctctgacaataagaccaagaagccatcctctaaagtaattgcctcccaaacatctttttttttttttttttttagttatacttgggagcttacacctgtaatcctagtggtcaggagccacacattcaaggctaacttgggtgacatagcaagtcccaggcaagccaggagtacagtatgagtacctgcctcaaaacaagcaacaaatctagtcttcttgggtctgtgggtatgtagctaagtggtgagcacctgtcttgcaggtttaggccctgggtttgatctctgcaggggttcaggagaatcagtttaatcagctgtactgaaagcagctcctgcttcagcagccaggccttcacgaacctccatgaagctcctgcctttttctcttgatatggtgatacaatgaagatgaaggaagcagagtccccaccctagaggaatctgcaggctggtagggaagtgacaacatggatgctgaaggaggatatacttctgctataggaccacaccgaaggaagatttgaattgagtcttgaagaatttcggggattggtgtggaagatggtggagggaaagaacatggcagatctggataaaatctaagcagtttgtatggatgctaggcttaggtttgaggaaggaagccatgggagatcagggttttctaggtgccaaggaagtaccttgtcctgtcatagacaataattttagtacagtctagctggggtctaaagagtagatgggaataatgggtgataaagagcataatgcagggaaacagaacctgcagagagcaggactgagtgagaaggaagagccagaaccgacggttttaaaagagtggatgacatcagtagggtgactcaactgtcctcatacctggcacctggtacttagcagcctctaatataacataagaacagatagaaagatgaagctggatatggtagtacatacctgtagtcgcagcactcaggaggctgaagatcactgtaggctcaaggctgcatatacatagtaagtagatagccagtcttcactacacaacaagactgtctccatgacacagacaagatgagctgaaggggatttcttccagtctttcctttcagtagacttttctgtaaaccttcataattgagggttgtaaacataccttcacggtgatagctaatccacattttcttgttaggtggagtgtgtatatgtttgtttattgctcagaacagggagtttgaatgtgtgctttggatttcctactcttggttggtgacccgggaatgaccaccattcctctctttttgaagtacaaatacagacactgtgtgtggtgatgtttttcaagtctttctgccatgagacaacatagccaaatctcacctggatggcttcaccccaccagttaaatgcactgggttttgatagttttttaaaagctctattttgacagtatttaaaagatgaaagcaaaataatatgtgatgtcagctaaagacaaaaggcatgtgtaacccattagtagatacaatagtaagtggaaataagtattattattaagctgttggctcatttctagaaatgatctgaaactccttactcttttccttcaagataatcaaccatatgtcgaaagagccagggaaagcaggcagcagattgaagctgttgacggtgctgtgtcagcaaattgcacatgccaggctaatttaagcctccctgttgcctagggcatggaagggtttgtcccatgtacaaccccatcttgcaggttctttggaatgatttaactgaccttgcatatgttataggtacacactgaacgctcacttcatgcgaatttgggtgataatgttaataagcactatagcactcacttgctttttgccaggcaccattctgagaacctttcctagtcaggcatgatgtcccacacctgtaatctcagcatttaggagatggaggcaggaggatcaggttcaaggtagagtcagtgaggtatcctgtaacctacacatgcactgtacatatgtgtatgcacatgtacaggtacacgcaaacacacacacacacgataaacctaaaaacaaatgtaagagttctaagttagccccagcccagtctacctgacaccatcccatctcaaaagccacacaccaacaacaccaaagcctttttccaggctcactcatttagttctcatatagtttcatgtaataaacatcactattagcccatcttactgctgagggattgaggcaaagaaagttgagataacctgccaaggagcactagctaattgaacaaggcaggtccaagcaggctctttccagatctcacgttcttaactactgtaattcttgttgcctggcatccttcccgcttatcgcaccttcctgaggagcgtggcttagtcaccatcttcatgaggcgcttcacctccactgctcccctctcctcacctctagggatgcttcggtacaggactgacaggagtatttgtaccaggttccatcttgtgactgcaccacagcagtctatccacaaggaaccttcagggtctgtgctgagacgttgcagtcctataaaaaccacacacaggaggacggtaaagctaaaagggtatggcgtggaaggcaaagataggccattggctgccgaggattgggtgaggtggagtaggatgcagtgggtgggtggagatggcttctccaagtacagagagcagagatggctgtagattatggctgtgtgaagagcaagcaagcatccttcagagagcatccttgagctgaggtggtagtaaaggaaatgctcccgtttatggaggcagcagagttgtgttaaatctgggtgtggggctgaacatctataatcctagcatttgagaagtggagtcagtgggattgtaaattggagaactgaatttgtgtggaagttctgcttcaaaaccagagcatatattcttgttgaaaggtctttatcattgaagcttataggggaaccgctctctgagaggctctctctcctgctctctcttgggatctgctttccagagctctgcagctttcacaataccacaaagttttgtgtgtgcgtgtgtgtccctgtgtaactgtactcctcccatgacaggatccccctgcctggtttaggatttttatattttccaatataaggacaatgcctggtacagagtggtggtaagaacagtgatgatgattggccaagtgggagaactgtgatcccagcacttaggaggctggggcaggatggagagtttgagagtagcctgggctgttcagcaagaccctgcctgtctcagcagtcatcatcatcataatcataatagcagtaaggatttaaagctgcagtgttagaattctgtaatatttatagaattacacacacacacctgataaatagttgttagagccatcttacattatagttgttctaatttcattgtattaccctctgttcgctgaatattttagttgaaatataggtttggtgacttttttaaaaattatttttagtcttcacatacatactgaccaattttccctccctccactccccccagcctccctcccacacctcccctctcccccagatccactcctccattgccctttaaaaaaaaaaaagccgggcgtggtggcgcacgcctttagtcccagcactcaggaggcagaggcaggcagatttctgagttcgaagccagcctggtctacaaagtgagtttcaggacagccagggctatacagagaaaccctgtctcgaaaaaacaaacaaacaaaaaattaaaaaaaaaaaaaaaagcaagcatcccggggatatcaatagaacctagcattaaaaaaaaaaaaaatcacagtatagactaggaacaaacccttgtatcaaggctggacaaggcaaccctactcccactgttagaagtcccacaagaacaccaagctaaacaaccattcattggggagatttgccatcctgtgtaagttatatcatgtacaaaatcctctgttccatgggccctatctaaacatgatgcacattttaattctgaaatactgttcgcatacagttggcactgtgttgacacagaaagtattggtagccaagactgagttccctgccaaagggaaatgtcagcttagcccagctaagaagctgatattcagaacagaccaccagtcccaagaagaaattaaggtatagaattaggtgcccaaaagtcatagaagggctctcatcctccccagctacacacacacacacacacacacacacacacacacacacacacacacacacacacacagacacacacacacacacacacacacacagacacacacacacacacactgtcacatcactttctcattaggacctgaggctcagtgtccaggtaggcccctgcagtcccaggcatagctagtacaaagatgattcattggaactgcagagtttcagacttagaatcagtgagttttgggaggcccctacaccttctgtgcaccagctcaccctgtgtaaatatgctgtcccggaatagcacaagtgagaaccccagcaggcagcaaatattggtatagcatttcctccatacactactatttttgagagaaaagtgcttttagaaaatgttcgggcctaattgaaaaagtacatagcaatcaacatttattccccactagcataaaactgtctaactagtagccaaatttgggatgcctgaagacagacaagtgactaatgctagggctgtgtgtggccagaaccaaatgtatttgtgaccacaagaccatgtctggattctcctttgtaattaccacacagcctactgtaattgtaaaacttatatttacttcctgcctttgacatgcagtccagggtccagggctgcacccagacctaccatgaaggtctctcttatttgacaacgtgtacaattattgagtgagagggtgtaagggtgtgtgtgtgtgtgttcacatctgttaaatatgcaagtataatcttgtgggaaaataatctcctgccttattgggtgaagcgcattaccagtctgatgtttattgaacaactcctatctgccaaggactgttttagactttaggaaccataataagaccacaaaagctttgtcttcctggagaaggtgagggttctgggaaggaggaagaaagacactctcgaatgccgtgcgtgtgggggtgtgtccctcagagcaccattacagtgctaggcatcaatgacttcttcagcttggtacatcagaaaaggcctctgcaagatgacatttaaaatgacattttaaatgacaagaaagagtggaacaagccaaggcaagaacatccccccagcagattattggagggacccagagacaagaaggaatttgccttgctcacagagaccaggtgatgggtgactggtgtcggtgaggttgaagggtgctgtggggcacggccctcccctcctgccaggaggaactgtggctgtccaggcagaaggtggtcagggcttgaactggggttcactagagatccaggcagagtattcagagtgaatcacgtgggttcagctttgagcaattagatggtaggaaagtgtgagacagaccaaaggcctcagctttgacagtggaaactgacatcttggtctatgcagtgcccaccctgtcatgtcctcaattgtgtgtgtcacaagtatttaactttgaaaatcctccttcaaacacttgcatcattcctgcttcctctggtgctcattctgtggcatcaaggaaggagggagatgtgtatgcatcccccacccccaagcgctgggaaggtggctcattggttcaaagcttttcttggttttccagacgacctgagcttggcagacttacaactacctataactccagttccaactaatgtcctcttctcgcctcttagaacacacatacacatgtggcatgcactcacacattaataataataataataataataataatatatgagaaaattcaaggtttagggatctagcttgcctaccttgcagaaagcccagtaccacatacactaggcatgtttcattcataactgtaatcctttcactcagaaggtagaggcaataagtcaaaaagttcggggtcatccttagctacatagtaaatttgagatcatcctccaggacataagatcctgtcttagagatgagggtggggggacatcaattaagcaaccaaatttgattacctgactcctaccctgtacatccctccactgtaatcttagtttttggcaggctttcttcctccacacacacagtgcttgcttcctgaacccaggcatctagatgcagggttggggttctgaggcctgcccattggttagacgttaacagctaacatatgcttctaacgacatccagccatccttcagtatctgtgaggggttatctctgggatgcctgagatatcaaatttcacaaatgttcaagtaccatagacacaatggcaagtgtttgcatagaacacactccctcttagagtctttaagtcatctctgggtttactcaccatacccaatttggtgtaaatgctatactcagaggcactgcactacttagggatcagtaacaagaagaaaagttctgtgcatgttcaggacaggcacagttgcttctctaaacattcttcatctctatgcctgatttaattcatatatgcagaacccaggagtgtgggaaacatgacatctcatttgcttgcttatatatgcaaaatcaggactattttgtgattctttaataaagattacattggcttaatccagctgctcctttattaaaggtctagtttctacagttgcctttgaaatatcatgggacttaaagacttattcttgtctatatactagacataacaatatagtccatcgtgggtattatgtgagtattaaatgaaataatatcaagtcactggagcagtcttcagtaagtgagctattattagtattaatgagacacctggcaatggaacactctagaagcagcacactgttcacagtgctcagaggatgcatcgggagaacgtagaatgacatgcaccctggacagttttaagcacaagctatgctttgtctggctcttgatgttctgggataagtaagactttggttggcagctaaccccactctccaaatgtctgtggttctggcagatctgtgcctttctctcccgcctgccttttaccacacgtaccatgcagttctgtcctggagaccaggtaaaccaccagaagtgatatttattgccagatgcgaccttttgtgagcaccttgtagaatcccagcattaatgtcactttctataaatacaggtgaagggtgaggaaatgctctctttagagaagtgtcgctattgcaatctttcctcttttagactctctcggtctgtgggctattactcacggctggcattcacccttctctctcgttacctccctgttcgtgatctctgccatctcttagttccctgctcggcctccctagcggttggcattgcatctgagttatgctttcttgcttcctccaccttttgaaatttaaaaatagaaaaagaccaacaaacccacagtctttcacgtgggctgaactctgttaatacgtctaacagattttccggtgaattccacactgtaatatttatagtcagaaatctgccattggttcagaataaactctgtaagaaattcacaaggagctactttattttgactatcagacacgaaatcaggcagaggagtcaccagcccacaggaggaggctttgcaaagagggtcccataggcagcgtgggtcccagaggcagcggggctccctgccgcccctgtacctttctacattacctgcccactttcctgagtcagtacttgataaaggagtctctcatacagtgaacaccaagcccagggctcagaaaacatgcagaccttcgtaggtgtgagcagtgtgagcagaaggcccaccccagtatcatactaaacaaacatgtaccaaacatgtacagactgttacatgctaaacaccattttattgctgacaggtgttttgaactttctgcaattttgctttgaaaatagaatggctgaaaataactgatttgtcactggctgttagtgtctaagcagtaatctttgcataatttattacattaaataatagatccagcctgtgtatcgattccaaatgaaatattgttaattactaaataaacggttactaaggataagcaaataatattatttgcaggcctttgacatgagttgatttttaagttgacagctgacttgcttagaataaaggattacccgctgctggtctgtagtgccttagaccagaagaagcaccactggtttgggatttgggagcacgtggacagacaagtacagccgggcatccctactccatctgaaatcagaaactttgaagtcattgtgttgacgctcagaaagagttccagttctgagacagagatgcacatctgttgatggtgtccagcatctctgatgcttctctacacccttggaaagggctaagatcacagacactaccctgctgtgtatgctttccagagttctgcttgggagtccagcatctttatcctcccttcatggagtgagtgtcggcttagggacttgaaattaccatacaagtaaaggggtccaataaagaaagggggcccctctaaaagagcagttggggaagaatctctggcctccaaccaaatggccgtgaacaaaaattccatgcccttgtcctgccttagtaggacagatagacagacattcagacaaacagacagacactccacctgccctaaagggaggcccaaagtagttgtgtaacacacaagtttacaaacccctctgaccctgctggagtttctgactgtcaagggcttgtttcccacaccttgacaagaaagcagttttaggtctatattattctaccagcatgaaagaaggaagaggaaaaagaaaaaagacagagaaaaggaggaaagaataagccattgacagacagttgacaagtatagactaaagatgacttacctgagatacttgggaccacagtgtttgtggtttgggatttttaaacatttgcatatacatagtgagataacctgaggctaggatacaagccaagcagaaagtttaactatatcccatacagtttctacacaaagcctgaagacaacaactttatacagtattttaaatagatgaatgtcctcaccagaaaataaccacctaagctaaaacagactctgatgtcatatagtattttaatccatgaagcaaagtctcacagtgtcattgtccgtgtctggtgtcatgtcggtatgcaaaatgttgtaaggtttggtgtattacagatttcagacttgcagcttagggagactcggcctgtagcctgtcttcagaaaggagctcacctgtcccctgttttcctcactaaaggacaggtgtaacacagtgaggggaagcagatggctctgtgttcacaacctcacactcactgtgcatcattctcagtgcaggctaggagctgaggtgcccccccccccgcccccctgggtcagctctcttcagagcagcaatgtgatggcatgctttttcacgtccttgagattccccaacatggtatttcacggggttagatgccagaaagatactgaaatctagctgtctctagaagctgccttctatgaaaccaaacatttaagatatttacaaatccaaaaacatgatgccattctctggtttgtcctgggaaatataattacttttaaattttaaattttttatttatatgaactgggtatggtggctcacacctttaattttagcacttaggagcagaggtagagggatctttgtgagttcagtgctagcctggtctacaaagtgagttccaggacagccaaggctgttacacagagaaatcctgtctttattaaaaaaaaaaaaaaaaaaaaaaaaaaattgtagcgggaggtgactcagtggttaagagcactggctgctctttcagaggacctgggttaaactcccagcaaccacatggcagctcacaactatctgtaactcctgttccagggcttttgacaccctcacactaacgtacatacagacaaaatgccagtgtacattaaaataaataaataaatgttatttatattgacatgcaatgggagtgttgctattatctttaaatacagcaataagtatgtttttttttaattcttcagtcttaatatctactgtggtaaatactgatacatacaacccatctctttaaacagctcctggagtcctcagtaatacctaagacctcattgaagttcaaatcatgcaccccaaagtgtttctgaagggtctacaggaaggtcctgtctacagtttgtttcttgaggcaggagccatgttgctttgtttgtttgtttgtttgcttgtttgcttgttttctccatttgtcttggtatcaaagctctgaagcaaggcaccttgctagcccaaagcctgtgactgaacacaggagagtccaggtcctctaaccaggtcatctgttaccaagctgtatccccttacagattcattatctgaactttgtaaagtcttattttactgacctggtccttgtgggcagaactggggaccccttgggactctgttaaaaacagaagagttgacctccagccatccaagtgcctagtgcagggactgaggtcaaataggtcctgaggaacttcctgcccttccttcctcgccctgcctgccacgctgctgagccaaggaagctcactagccccctttctccctgcagatggtattcatgcagacagagagaatgatctgacagaaggagttgacgaagatatgattgtgacccagagccaaaccaatttcatctgccccataacacaggtatggcttcatctttcccctcaaagaaaatggagttaggttggtttcacgggagcagaagggttcctgtttgctttctgatgtcccatgggagggaggaagcaaaagtgatgagatcaaacttgggaggtttgtggctagcactttcatttaaccatatactttaggacctggggaaaagttagagcccagagaccaagtaaagttacagcccctatagccctgaatttcatgattgcaagctgatactagaagccatgaagatgagaatttagcctctgggggtactaggaagtgggtggtcattattcctgaacacctaatgtctccttaatcatagctggaaatgaagaagccagtgaaaaataaaatgtgtggccatacatacgaagaggaagccattgttcgcatgattgaatccaagcataagaggaagaagaaggcctggtaagtgggtgctggtgggggagcagggcaccctggtggtcctcagtacatgccagaaaaagctgcccatactccccctagttatggctctgcccagactgtcaacaggaaacttgctatccgggaaggacggtgtgcagaagacactaaaggcgctccagctacaccatccgcacagaaggaagagcgggtgggactggagtattggattacagaactctagagaactctaggtgatgcttacaagttagctagctgggtgctagctcagtttgtagagcgcttacctggtgcacaggaagtcttgctttcagttcaaacaatcacacaaatcaggcctggacacatgcgcctggcacccgatcagtgaggcagacaggaggatgtgagagaggaggccgtcctcagccacactgagagtttgaggacagcctggttatatgagacactctctctctctctctctctctttctctctctctctctctctctctctctctctctctctctctctttctctctctgttgcacactcaacgcacatacacacgcacacacacacacgacacaccaacaaaccagagtagctgaggatcaacaaaactataatctgagatactcccctttttcagtgtctacttaacccagaggaaatttaccttattctttgctttctgcaatagtgctttggttttaaaataaacattcaagacaagaattcatatccagtggtcttggtgaggaagactgcattaccaaagaaatgctttcatttgatcatgtaaataactccccgaacagtttcaattaatccatggctaactcaccaatgagaatttttttaactccgaatcttccgtcccttctctccctacctcccaaccccaggaccatggctctgtgcctgtgacgagagtcctcagtgggccacactgaagctgactgggtttggcatctcctgagctcttatcgcaggaatggaatggcaggtgtgaccgttctcaggctctgatagcagcccctgtgatgtgtgctttgcttcttctgcatcacccagaccgagagctggaattcccctcctctccccatgtgggtgtggactgagagctagcaactgaggactagagagagatagctccttggccattcagtcaagtaattttcagtatttactctagaagacaaatgggtttgcagccattaggctacaaatataaaaaccattagttcatttctatgttttgcatttctgccttagaatccaaatcctgtatttccctaatgaccttgacattttaccaacaagcatcgttttgtttctggacttccaagccttccttctctactaatttttaacctgtgttccttctctgacaaaccagaaagggtcaacataattcctaagagtgcttgctagtttgctgtccttggcagctcctctttctgacagtgtgtgatactctcctgaagttggggctggaaagggcagggactaatacaaagcatgtttcagtttcctaccagcagccccgggtcggtgcagggtgttcccacacttagatggcttttctcacgtacagctctgacttcctaatgcccattgtccatttggaactacacacaatacttacaagcatttaagtggtacttgacatctaaggaaacgttctcttctctccctgtcatgtttccataacctggggggcagatacctgaaaatgttcatagactaataataaccattaagtctgagaggaggaaagctttacaaagatgacattgttaccaggccttaagaaataaaggaacataccggggaatggtgaaggggctttaggagccaggcctcttgaagttttccattgtaatctctttttactaggtcaaatcccccttttcttctttctatgtgtatgtgatgtgtttgcatgtgtgtatatgtgtgttcatatgtatgggtgcacatgtgaaggtggtatggtatgcatacacattgtgtgttcatacatgtagagacccagtgttgacgtcaggatctcccttgattagaagtaaggtcttgcaaagcccaagcttgcaggtacgcagatatgctggtcttactaggcagagtgtcccccctccccccagacatcctggcctctaccttctgagtctggcattagagctggggcgccgagggctccaggaatctgactccaggcctcatttgcagtaagatgctttatccactgtgccctcccccagctccctcacctaagacattttatatacagccccaagcatatagctatataaaatagatatataaattaagcatttactaatactaaattataaacaaatttattcaaagacagttcttcaatgtttatattttactatttattaaagatgaaagcaaatttacatactaatgagtggatatgcttaattttttaaaaaaatgttgcttgttattgtaaataagtacactgtagctgactttagacacaccagaagacggcgttagatctcattacgggtggttgtgagccaccacgtggttgctgggatatgaactcaagacctttggccgagcggtccaaaggatgctctttggaaggctcttacccactgagccatctcaccaacctgatatgcttaattttatataaagaattaaatatcagctgaatatttgatactgcagatagataaagtaccttccgagttgattgaagcttttgattttctaattgtcaatgccaagaacaccataaatgcatagtaccaaaagggcagaacgatctttacagccatgttagaaactgttgggaattttatcctaaccccaagctaaaattcattttacaattttttcttatgaaacctaaagtcagtaactcactgacttttctaaaatcaaacattctattatattacaagacaaagatacaatgatttgctacaacctatgggatgataggaggaaaatactgtcttttctcccatcatgtttccacgagagcaggaaacacgtgcacaggcatttgtaacgcccagttgtctcaggtctgagtggaggcgtttccctggcactgtgcggtgtgacagcagtcccagggcaggcacacacagtgtgtgtggagagggaaggctgcagtgaagtctggggtgcaccgtgggcgcgtgtgggcagtagagagactttgctgctctccagaggacccaaggtcagttctcagcacccatcttaaatgccagtcctaggggatccagcaccctcttctggctgccatcccaccgtgtagataacacaacaggcataagtgcaggcaagaaaaaactcagacaaataaaaaaaataacaaaatagtttttaactgggtattttagttaatttgtttttgagacagtctccctgtgtgaccctggctatctagaactcactgtgtagtccaggctggccttaaattcacagagattcacctgcccctgcttggagtaaaggcgtgcccctccacactcatcagaaactgactcctagagcctccctcccactcctctatcccccaccccacccccatcagaccagctttcccgtagagggcagtaggtctggtgttggctagttactgtttgtggcaggaaagtaaaatgacaccgtagatggtagaacagtaaataggcagagacccaccacagaggcagtgaatgtccgtttcatcactttcctgctctgtaaactgatggtgatagttttctcactggtacatctgaaacttgaataagatatgttctaaaggagcaggcacacatgcagtaagactcagtaaccatgagtcctgcatccttgtcaagctttcgacagcatcgtcaccagcatctaccagctctgcccataggcacagaagaccttgtagagaaaggggattaggaggagccaatctggagctgaggaagttactaccgaagcagtgcagggggcaggtgctaaaggctgtggcagtgccagggtggtgcgcccacagtgcattctgtcacagagagtgagcaggcacgtggaagtgaggtgtgtatgcgcccgacagaatgtggtagctgattgaaaatgggggaggagctagaggggaatatgactgctaattcttttgagtgtctagaagcagttgctagctgcttggtcagggagaggtggaagagaggagagtggccagcaggggttctgagagtctgagatcatagccatagagccccttgaaaacagccaaggtgcaggctgtgcccttagaaggtgactgagccagccatgagaattgtgtggctatgaggatagagctgggcagctgtcgctgaggcacagttctgcagaggccagcaggacagagccttggcctggcataagctctcttcactcaccataaagcctcggcacctgactcagagccccttgctgtcagctccaagcagcttcttgttcagcagttactgcactcaagtacaagacctgtgggaagcagcctaaaccacacccaagacgagaggcgctgcagtcacagagccagtgtcaaacgnnnnnnnnnnnnnnnnnnnncagtgtcaaacgcaaggccaacctggaaaccgattagaactcactcggttctgctcacagcttactctgtaggtttctgattcagcatgaagtggtgtcatttcccatgaagcactgtttaaaaaatgtgtgtgacacatcctgttagagaacggtgtctctctcctgttccaattatgttaggttactggagtcccaggcacactgtgttacttactgggtaccatctgaacttcccagcatgcttcagaccctggcggcctgtccactggacccaagtggagtgggcttgtggggcttttcaccctagtatactgttagagtcatttcctaaaaccgagggaggtcgtaagctattatctctcaaataaagctgcctgctcgttttcatgttaatgaactgtggctgactgtgacccccaccaattgttttggttttctgaatctttagggaattctaagctcatcagatgaagtgaagagaaatgtgtgatgtcaaagcagaatcacttaccaacaaataactgagcctctcagccgggttctttatctctaaagtaaaaatgacatcaactcaaaattccagtgaccctagagcctacaggggattccttccagatctgtactgtcccatttcttggctgtgaagaagaccgggagatagctcagctcagtgagggttcagctcatccccagaattcacatcaaagtgccaagtgtgatagctcacttgtatcccggcactgggagagggagggagatgaaaggcaggcaggcccctgaggtcagtgaggccagccagactagtggctgtttagcaagaattaggccagtgaaagagtctgtcagaaataaataactagtacagtggaccctgaggagaacgacagggatgacctctgactcccacagcatatacacatgtgcacagctgcacacaggcgggcagaagcacaggcctgacaggaagtttgctggtgtacagtgtgaactcacagctgtggggcccttatggcaaacagtcatcatgtgtacctcactgttttgtgacacatcaccctggacttggaggcgatgggacacagttactctctgagtgtaactatgtcaggaatctacccagctctaatgccagaggtatctgtctatacagctgcttcctagagcttatgggccaaaccttgatattcttaggacccaaatctgcatctctccatactcagcattgtgtgatcctgagctgaggctgaggccccgaatccccgatgcccctgggaccctctgcaccctgagacctctccttagcatagactcgcaataaggaatgctctgccctgtggctgacccaggcacaggaccagcctctccttccaggtctgtgagtctgagcccttcctggggatgagttgatgatgttgaaggtgttgccacacctgacttgctcaccaggatgtcctggggattatggcctaacgcttgggtagtgttgtttctcggagcaggaatgccctgattcaagcccgtggcatcatggccttttcttaccctttttagtttaaaaacttgttcgtttctgtggggtggggtggggtgggaaacaaggctgtgccctggttcctgtcctgcctctcctccaggaagtctctcaaaggttctcgcatgctcttcagtgttgttctcaccatgtctctggttgagccgccttgtgtgaggagacaggactggttaactgtggtctagaacagcaagtgctgcgtgatgagacctggagcacaatcctttgcccgtggcattcagtggccttgattttcactgtgccaggatgcctgcagacagacaagaactccacgttcatctgtttgcaggaaaagccttgtgccgtcacctggacagtgtcagcactaggggagccgactgctaggcctttgccgctcttttggagatgtctcactatatagcctagcctagcctagaactttctgtgtagctcagtcttgcctcagcctcgggtgctgggattgtaggcatatacacttgtcttggctcttccattttccagtttgtatctttgttgtcgggtcacctcgctcccctcggatacttgatttatatccctgttcccagagcctgtctctgcatgacacagacatcaccaggctccatcccatcccatcaacatgagtgtgggcgcctcctctgcagctcagtggtgtggttaattccgtcagccattctcagaatgccctcatttactgactaaagccactgatgtcatcaggaagtcctcccccctcactctccacttccctctccactgcttattcactgtctggcagaaggaggtagacgctgttctcaggagtccactgcacccaaggtctggtcgtcagggacggggctcggggctcgcctctcagggaggttcactccagaagccccctgttgtgcacgtccatgtctgggaagcctaggggatgacagtctccgtttctaaagtctggaatgtgtggatgtctccatcaccatctcatacttaggaattccaaagtacatcggtcgagctggggtgagcaggtggggggctacgcagccagattccaggcaaaaggaaggaaggaaaggaggaagggagggaggagagaagaaagagcgctcctatgcctgactgtacaggacacatttagcatttcaaaatgaattcctgttctcaagcttactgtccctgcaaatgggctgcacactgtccagggacagcccatgtcctgccaacactccttgaccccaggatcaaggccaggaaacacctcctctttcctgcctcatccctgcattgtaactcccaggtcaggttcccttcccttggccttttaccttttactctgcgtttcctgtgcctctagaagagctgtctcagttcatggggctgagccctgtgtggatcagagccgtgtttatacttaaggctatgtgattagaacctagcccagagctgatcacacagaagcaccgggaatgcatgagtggtgtgtgtgtgcacagttctgtggaaggacaggcagacagaccagataacttaaaacttcccaggaggtgagtggccagcctaggagatgggaaagtggaaggacaccatggagcactgtgaggcccgttaccctgtggagtggggaccctgccccagaaaggttatcttgaccaccaatcgcgtgtttgagggaattcaggacctgcgtgagcttgactccaaacactgggcacttagccctgcccaaaccttgttcactgtaaaaagaaatcaggtgattcagtccaaacactccctcaactgagatggctaactgagcaaggccttgagttccgcccttttctggtgagtcacattcttaattccctcacctcgggcttctggccagagcccagtgtccctctcactctctccattgagaggtttcatggcattcagagggatggagttcaggcaggactcctgcccccatgcctggcctgtgttcccttcccatcgaagttgtccactgcttggctctgccctctcctttgtttacttgccttccatccgagggtctgcaggtcctatggcctggtgtgtgttggagcctgtctctgccacacactcaaccaaactgcctcgcccttcctgtactgatgtgggacccccactatttcctccaccttgccctttgccctctagccttttgtcctctctaagtagctagagcaagttttttaaatggaactaaattttatcccacaccgatctaaaatcttgggggagggtgtgttttcatatttaaaatgataccccaggctgaggaagtaacttagttgatagctttagcctatcatgtatgaggcccagggtttgacacacacacacccgccccagcacagcataaaatcaggtgttggtggtgcgtgcctgtaatcgcagaattggggaaatgagatcaacaggaagttcatctccagctacatagtgagttcaaagtcaacctgggccacacgagaccatgactcaaaatcacctagaggtccccttgcccctcctttcacctcattcgctctcactgcagagcacctggccaagccttctgggcagcctagaccacatgcaagcctggctcccctcccctccctgctcccccaccccatgttccctctgtcctgcattgcttcactgctattgtggcatggtatttggtacttggtgactgcctgcctcccgtgttagaaagcacggccctagtgtaggtgccgctcctacattgcttgcttccccagccccaaaccaagctgccctcggtggaaaaaaaacgtgtatgtgtgcatgactctgggtttgagggtttgggttttgttcttgggtttttttgttttttgttgttattgtggttgtttttgttgttactgttttgggttgtttttgtaacgtgttgtgattccagtgcccggctgtgagagagagaggttaatgcctaaggcatgacggtggcatgggctcatgggtatttttccttcctcacagttgccccaaaattggctgtagccacacagacatgagaatgtcagatctcattccggatgaagccctgagaagggcaatcgagagccacaacaagaagaaaaaacgccactccgaataggagcaagccacctgcccacagggatgtcagcagcctacctccccgccagccaccagagagtgagggatgccagcgataggcctggccaagcagcgctgtttgcggtaacccttgaaggctaattgtaattgaaagcattttttaagttacacagtaaaaacacaagtacattatattctttattttcaagtgctctgaaattttaaataaaactttgataatcct

SEQ ID NO: 118 - DNA, 961 bp, Mus musculus
ggctgaggaaaggagtcggggtctgggcgtgcgacgttcggctagatatcaccgagctaggtgggacagccaggtaacaatttcaagatgccaggacggtccagtacaagttcaggttctacccgttacatatccttcagtggcatagagtcagctctctcctccttaaaaaacttccaatcctgtatcagctctggaatggacacagtttctagtgttgccttggaccttgtggagactcaaactgaagtgagtagtgagtacagtatggacaaggccatggttgagtttgctaaaatggatcgagaactaagccattatgttaaggctgtgcagtctacaatcaatcatgtaaaagaagaacgtccagaaaaagtaccagatttaaaattactggtagagaagaaatttttggctttacaggataagaactctgatgccgactttaaagagaatgaaaagttcgtgcagttcaagcaacagctgagggagctgaagaagcaattagtgaaacccaaagaagatggaagacacagtgaattcgacccgaataaggattccagtagagcaggcaataaacgagatggtattcatgcagacagagagaatgatctgacagaaggagttgacgaagatatgattgtgacccagagccaaaccaatttcatctgccccataacacagctggaaatgaagaagccagtgaaaaataaaatgtgtggccatacatacgaagaggaagccattgttcgcatgattgaatccaagcataagaggaagaagaaggcctgttgccccaaaattggctgtagccacacagacatgagaatgtcagatctcattccggatgaagccctgagaagggcaatcgagagccacaacaagaagaaaaaacgccactccgaataggagcaagccacctgcccacagggatgtcagcagcctacctccccgccagcca

SEQ ID NO: 119 - protein, 271 aa, Mus musculus
MPGRSSTSSGSTRYISFSGIESALSSLKNFQSCISSGMDTVSSVDLVETQTEVSSEYSMDKAMVEFAKMDRELSHYVKAVQSTINHVKEERPEKVPDLKLLVEKKFLALQDKNSDADFKENEKFVQFKQQLRELKKQLVKPKEDGRHSEFDPNKDSSRAGNKRDGIHADRENDLTEGVDEDMIVTQSQTNFICPITQLEMKKPVKNKMCGHTYEEEAIVRMIESKHKRKKKACCPKIGCSHTDMRMSDLIPDEALRRAIESHNKKKKRHSE

SEQ ID NO: 120 - DNA, 1094 bp, Mus musculus
acgcagagcgcgcgcgggtcgtttcagccacagaagtgggctgaggaaaggagtcggggtctgggcgtgcgacgttcggctagatatcaccgagctaggtgggacagccaggtaacaatttcaagatgccaggacggtccagtacaagttcaggttctacccgttacatatccttcagtggcatagagtcagctctctcctccttaaaaaacttccaatcctgtatcagctctggaatggacacagtttctagtgttgccttggaccttgtggagactcaaactgaagtgagtagtgagtacagtatggacaaggccatggttgagtttgctaaaatggatcgagaactaagccattatgttaaggctgtgcagtctacaatcaatcatgtaaaagaagaacgtccagaaaaagtaccagatttaaaattactggtagagaagaaatttttggctttacaggataagaactctgatgccgactttaaagagaatgaaaagttcgtgcagttcaagcaacagctgagggagctgaagaagcaatatggtattcatgcagacagagagaatgatctgacagaaggagttgacgaagatatgattgtgacccagagccaaaccaatttcatctgccccataacacagctggaaatgaagaagccagtgaaaaataaaatgtgtggccatacatacgaagaggaagccattgttcgcatgattgaatccaagcataagaggaagaagaaggcctgttgccccaaaattggctgtagccacacagacatgagaatgtcagatctcattccggatgaagccctgagaagggcaatcgagagccacaacaagaagaaaaaacgccactccgaataggagcaagccacctgcccacagggatgtcagcagcctacctccccgccagccaccagagagtgagggatgccagcgataggcctggccaagcagcgctgtttgcggtaacccttgaaggctaattgtaattgaaagcattttttaagttacacagtaaaaacacaagtacattatattctttattttcaagtgctctgaaattttaaataaaactttgataatcct

SEQ ID NO: 121 - protein, 245 aa, Mus musculus
MPGRSSTSSGSTRYISFSGIESALSSLKNFQSCISSGMDTVSSVDLVETQTEVSSEYSMDKAMVEFAKMDRELSHYVKAVQSTINHVKEERPEKVPDLKLLVEKKFLALQDKNSDADFKENEKFVQFKQQLRELKKQYGIHADRENDLTEGVDEDMIVTQSQTNFICPITQLEMKKPVKNKMCGHTYEEEAIVRMIESKHKRKKKACCPKIGCSHTDMRMSDLIPDEALRRAIESHNKKKKRHSE

SEQ ID NO: 122 - DNA, 275134 bp, Homo sapiens
  misc_feature (1)...(275134): n = A,T,C or G
acccagtttccacccctccctcaaggcggcggtcctcttctatccgcagtcccggacctggagcgggtcagaccccgacttccgcccctgactccccaggcggtcacatgaccgaagcggctgggagcagggaggggcatcatgtgaccactcgccggcgacggctgatgacgcaagagcccgctctcacttttcagcggcaggcgaagggggctgaggaaaggaggtgggtctaggcaggggaaattggggtgccaccagacggagacagcttggactaccaggtagggaagaagcgggggacggcaatggggagggtggcaggagtttcgccaccctcagggacactccacggggactccgagccgggggtccgtctacccggattatggttgtggaacttttcacgccacggtagtgagtctgggacagtttaccctcctgtccgagacgccatctctccatcctttcgcctcaagtgtgtaggggcaagattacgaatttttgatccaaatagattttgtttgaactgactttaaaagtaaggccacgggaaggtcgtttgaataaactctctggacctcaatttcctcttcagttatgtagattgcagtgagaattagcgataaggagaataaagtgccgggacaccagtttatggcattctgtaggtgaccgagaaatgatgatgtctgttgttatttttgtaactggccaaatctttattggtcccctattttgtgtgaggaattgctttatatgcaatagaatatgtcagggttctagtttaaggaggtgtcagtttaaagaagctgcagacatgtgagcaaatagttgtgatgagtttcataataggagtgtgttgtgtacatgtgcatgtgatagggataatggtagcatgagggagggaaaagcaattgtatgagaaggattcagagagaagggattatccttgcatgttgaaaaaggagaggcagctctggctgacttgtacaaggctcccatggatttaaaggaagtcaacatattgtctataaataacatgcagagaaaaaactcaggaaatgcacaacttgttctaaactttcttggagatcataggtaccgggaagaaaaagatcagtgttattacctggggagggatccaagagagattgatttaaaccagttattctcaactgatgcactattgacattttaggccagataattttttgctgtggggtcagggtgagggctgtcctgtgttttgtaggatgcttaagagcatccctggcctctgcccgctagatgccaaccacaaagtctacagatactgctaaatgtccccttgcgagaggggtaaaatccttcttggttgagaaccacttaaaccaagccatgaaagatggtatcttagtcaatgtgggcttctgtaacggaaatgccataaactaggtagcttatgaacaacagaaatttatttctcacagttccggggcctgtttcctggttcataggtggcttcttgctgtgtcctcacatggtggaatggcaaagcagctatctggagcatcttttaaaagggcactaatcttattcatgaaagtgggcctcatcacctcccaagaggccccacctcctaataccatcaccttggaagttaggatttcaacatatacattttgggtgacacaaacattcagactttagcatatgggtaagatgtgggcagatagaaaactgaagagaggccctggcacagtggcttatgcctgtaatcccagcactttgggaggccaaggcgggcggatcacttgaggtcgggtgtttgagaccagcctggtcaacatagcgaaaccctctctctactaaaaatacaataaataaataaataaataaataagtaaataaataacataattggtgtgtcctggcacacacctgtaatcccagctactcgggaggctgaggcaggagaatcccttgaacccaggaagcagaggttgaggtgagccgagatcatgccactgcactccagtttgggcgacagagcgaaactctgtctcaaaaaataaataaataaatagaaagaaaactgaagagaaggttttctcatggtgggagcaggatgaggaaaagtcctctttttcctttttggtgacagcgtctcactcttatcgtccaggctagaatgcagtagcatgatcatagctcactgcagccttggactcctggacccaaggagtcctcccacctcagccttccgagggtctaggacaataggtgcaagccactatgtctgtgtaagtttaaattttttttttttttgtagagttggggtcttgctgtgttgcccaggctggtcttaaactcctggcctcaagcaatcttcctgccttgccctttcaaagtgctgggattataggcatgagccaccacacccagcctgaacaaagtctggagctgagattaagaatattgggtatgaaggggagaaggaaacaggagagctatgaatctgactgaagcagacagttaatttattcatttattgactattttcagagcacttgctgtttgtgaagcactgctaacatcttgcaagatagtcactaacaaagtggagtgactataattataattatatcaaagaaggtgctgttagagtcagagaaaggagttgtctttgacttgtacttagctgtatttattgggagagattgagaaaagtatgtctgttccatctttctgcaccatccattgcctttgcttttcaattcaatctcagtcttaatcttttccctactccagaattacagaagagcatgatcgtgttttccttggtcctctgcaaaagtgaagtttcactaaagtaatgtgagttttgcattcaaacaaatagtgacagctactgtttggtagatactttccatttatactggattgcattaatcttcatagatactgtgtctttgttcaagctaccataacaaaataccatagactgggtggcttaaacaacagaaatttatttcttacagttctggaggccagaagttcaaggtgaggttgccagcatagttggattctggtgaggactttcttcttggcttgtagatggctgccctttttatgtgtcttcacatggtagggagagagagagagagcagtccctggcgtctcttccttttcttttcttttctcttttttttgagaaaagagggtctcgctctgttgcccaggctggagtgcagtggcgtgatcatggcttactgcaacctcaacctcccggctcaagcgatcctaccacatctcctcctgaggagctggggctgcaggcccgcaccaccacatccagctaattttttattttctgtaaagacagagtctcactttattgcctgggctggtctcgaactcctgggctcaagccaacctcccacattggcctcccaaagtgctgggattataggcatgagccacctttccagccaggttttagataatcagtacacatgtgcctagtgcctatcatattggacagtgcagattatagaacgttttcatcacagaaagttctattggacaatgctgctctggacaatttagacttacactagaatcaagactgagtagaaaacagaatacttctgctgatcatggtgtctcatgcctataatcccagcacttgagaggccgagttgggaggatcacttgagctcaggagtttgagaccagcttgggcaacacagggagatggtcgtctctactaaaaattaaaaaagaaaaattggccaagtggtggcgcgcgcctgtggtcccagctacttgagaggctaatgtgggagaatcacatgagcctgggaggttgaggctgtagcgagcatgatcatgtcactgcactccagcctgggtgacagaacaagaccctgtctcaaaaacaaaaagaaaaccgaggccaggggcagtggctcacgcctgtaatcctagcactttgggaggccgaggccggtggatcacttgaggtcaggagtttgagaccagcctggcaaacatagtgaaaccccgtctctactaaaaatacaaaaattagcctggcatgtagctcccagctactggggaggctgaggcaagagaattgcatgaacctgggaggcgtaggttgcagtgagccaaggtagtgccactgcactccagcctgagggacaagagcaaaactccatctcaaaaaaaaaaaaaaaaaaagaaaagaaaattgaatactggaattatatcatttggtccttgcaggtttgtgttttttgattaatacttagtactgtaacaggtaaaccccacaagtctaaatggctttgcccagttgaagtttctttcatgcatggagcctgataggtgagtagttttcctccaagcagtgatgtagggccttgagctccttccatgcagtaattctctatcatcagcatatagctttactaaggtccctatgcttgcctgcatcaagctatcaaatgggaaaatgtggctttttgcagattaggcctggaaatggctcacatttcattgccttgggtacagtcataggccacagctaacttcaaggaaggctggaaaatgtggagcatatataggcatgtaaccgggttgaagaggaaatggttttggtgggcacctgtccagtatctgtcacaagtgttttgtccttacctgccctgagaaatagtctcaagaaacagtcctagaagtttgctattgcatttactataaggatatttttgaggattatttttttcagtgtaacccattatctcatatatgatgatccatacttgccttgattgccatggaaagctttatttttttcttgagtttctagtgttatttgttttttttttttggagaaaataactgtcactttttgttttgattgtgaggaagctcactaccaaatgtgtattactagtactgtgtggaatcctttttttttttttttttttttcatacggagtctttttgtgatctcagctcactgcaactgctgcctccaggattcaagcgattcttctgcctcagcctcccgagtagctgggactgcaggtgtgtaccaccatgcccagctaatttttgtattttcagtagggatggggcttcaccatgttggctgggctggtcttgaactcctgacctcgagtgatcaactgcctcggcctcccaaagtgctgggattacaggcgggagccaccacacctggccctctgtgtagaatcctaaagtgtgcgtgactccattataactttctcatatgcttggtttgcccgtaaatttctgttttttgatcctggtttttctgaatttatgtttttccatctttttgtgtatgtttgtatttatattgtgtaaaatgtctcaacttgtttggtataatacagtgagattgtaaacaagcagtctctttcaatgcaaatgtttgaagatcatcattggcttttattcctgtttgtattttttcttttttgatgtggaactgtaaagtcccagaaaagaacacaacaagaacccttgtttcatcacccagattttaacatctttaacattttgccatatttgtttcaggtcttgatttttaaggtaaagttttgaaaatacatagagctcaaatttccatgatgaccactagacccaactggagtgaatctttatcctgtacttaaggctgtctacactatattcccaaagaatgaaatccagttatcttcccattcctttgtacctgtatgccaggcaaagggaactcatctcatcgtttactaccttatgatcttttttcatctcactgcttccttcatctgaacagctctccctgataatttagacctttccaaatcctgagtaccttttatggtccagcttaagtgccttcatttccgtgaagcctatgtctcccctgttgtgcctataatcctttcctttcttgaacattgtagcatagtgggtttgtgtaatcggtttcttttttcaacttcatagtacttggttcattcttttaatatggaacttgttctctgccaagcctgttttgaggggttgtggcagaaaggagttatgtttattctggaatatcaaatagttaaggttatatgaaatgtatgatttaagtcttggtgaaaagtagaatctctgatttgaaaagcgtgtttgcattatattgtagaaagctttggatactgtgctaattatgttgaattttattatataggcaggagggagttaggaccaacccttcctgcttttttctgtctttattactggcatctctgtcttattagcaagctcaaagaccttaaggtgaagcatgcctgggttattaaaggactagcaatggccagataatgtagaacagtggtcttcaaagtgtaattcttggatcagcaaaatctacattacctggaaatttgttagaaatgcagattcttaggtcccttcccagacatactgaattagaaattctgagggtgaggtccagcaatcagtgttttaatgggcccatcagatgattcaatacactgacactacatgtctcctagatatatcagagttagaattacatagaggacttgttaaaacgtagattgttggggcctgagaatttgcatttctaacaagttcataggtgatgctggtgacacttggtcaggaaccatttggagaaccactattgtcagttattacgaagctctttggccattactcccggtgagtcaggaagtccttaggagtttttgagcagaggagtcacatgatcttacgtacattttcaaaggtttactctggctgctgtgttgagaatagggtggaagaggcaagactgagagcagggagaccaggtaggagactgttggagtaattcaggcaagagatgatggtttgaatcacggtgttatcagcagaattggtgagagtggttggattctggagatagtttgactacagagctggcaaaattgatgttgagtttggtataggatatgaggggaggaggagaaggatcaagtatgaaccaagagttttggttcaacaaatggaaggatggagttgctatttagtaagatggggcaggttgtaaaaggagtaggtttgggggaggggtagggcgggagagaaggaatgtgggccttccatgttggacgttttaagttctggagtgatcttgccaatggtatttagatggaatgggtctagttgggaacactaggtggatgggagaggatggaaaagagagatcagagcactgagccctgggcataccacctatactacagttttggagacatgtgctgttttaggtgctggagatacatagtattacattcattccttctttcagcaagcctttgttgaatggccactaatgtgccatgcgttgttttaggtgcttggaatacagcagtgaacaaaacagaaaaagtcaaaaagtctgtaagtttaaggaacttacagtgtaattggggactagacactataaacctaataaatacaagaatgtcgtttggcaatacctgccttgaggaaagataaagcagaagcagaagggtgggaatgcctgggggtggagattgggagggcttgccgttgtatatcagatggccagggaaggccttactgatgaggtgatactcaaagggagaccttagagaagtaagggaattgacctagtagatatctaggggaccagtatcatggcagagggaaccaagaaggcatagccctgaggcagggctgtatttgatttgggtatagaaggagaagaaaaagaagcttggattctgaacctgggaccctacaacatatggagctcaaggagatggagaggaaacagaaaggagaatgagaacaagaacaaggtaggcaggtgcagaaagtgcatcaggaagggagtgattaactgtgttgcatactgctggctgataggtcaaaggagatagggctgagcattgataacaaatttaacattaagtcttttcaggtgaccttgacaagagcagttgcagtggagtgatagagatggaaccctagtgggggtgggttccaaagggaatggaaggagaggatttggagacaaatgtatacaaatctacagacgagttttgctctaaggctgagtagagaaatggggctggtaaccagaggggtaagtgggaggaaagtcggaggatgtttttgagatgggagaagtaatggtgtatttgtttgctgaagggaatgattcagtagagagggaaaatttaatgatgcaggaaagcagggagaattgctgggagaatgtcttagagtagggagggagggataggatctagtggataattggagtggaggtggccttatctaggagcaacagtttattcattttaacaggagggaaagcagagtgtatgagaactgatgctgataggtggagaggtaagcggtgggagcttgcaaaatttctattctgactgcttctgtttcctcaggaaattaggaaactagatctttcagtgagagtgaggatagaggaggaagtgttggaagtttctagtgagaggagtcgtaaaagagcataatagaatcaggaaaagtcaagtattgtcttatgtactctgcaatgatttgtgcacttcattcctacctgccttttcctttgcctgaatgcccttctccattacccttccatctgttaaacttcgtcttttatcctttaaactcagttctatgttcccttctttgatccagtcaggcaaagttgagcattttcttatctgtgcctcagctttgcagtaactcccatgttgctttaattatcaggtttatgttttatctctgtctctcctactcagtggtgagcccctgggagtagaggctgaattttttttatttttatttttttgagaccgcgtcttgctctgttgcccaggctggagtgcagtggcatgatcttggctcactgcaacctccgcctcccaggttcaaacaattctcctgcccagcttcccgagtagctgggattacaggtgcccactaccatgccctgctgatttttgtatttttagtagagacagggttttgccatgttggccatgctggtcttgaactcctgacctcaggtgaccctcctgcttcagcctcccaaagtgctgggattacaggtgtgagccattgcgcctggccaaaggctgaatatttctagtgcctgggatagtgcctggctcatgataggttttcatcaaattagaataacaaaataattctttaaaaggagagtgtcttaagagtgctcatcttgaaaactgtggtattctcatgctaaaggaagtgcctggcacttaaagagatactaaatatttgaactgacaatgagttgtactgtggatgtttgaggtaaacaaacacttcaaattagaaatcttatgcatctctgtgcatcttgcatgtctctatgcccttctctttttatatcctgtggatttttgaatgggtctcatgattgacatggtaggtactcaatacttatgagtgaaatgaatgaatgaacctaattaaaaaggactaataatggagaaactacaatagtagttcagctgtgagatgaaggtggtagcaatgatgaggatggaaatgccagagatactacacagttccccacttaggaagggcagaagggaaggctctaatgctaattaattgtgtactgtatgctataccataccatggttattcctttccattttaaagatggtaaagctgagattcagagatgtttagcagtcttcatgttatgtctatctgattccatgaaaatacccctttttctgctgccatagagccttgttaatagccctcccatccctttaaaactgtgaattctccccacttttctagttggtttcagtggattgagtttcaaatggcttctgaattaagcagagatgtccttttgtaggcagctttacattgctttactaagctgaaacaaattgtggttgaagatatagattaggaagtgttaaatatgaaggtaataactgaaactgttatagtggatgtgctgccagaagacaagtttatacagaaattctgctttcactgactctgggatctcaccaagtctattaatctgttagaagccagaggaactggcaggaatatagattttctcttttttttacagtttccagaattcagtatgcatatatgttggatagtttaacgattacaggttttcaaaatagtttactaataaactattttattagtatttttttctctttggaaaattgcatcatatgagtggtctactttttctaacccatttatcttgtaggcttttaagaactgtgctattgttgacttcttcacagaatcaagcactcttttggaagagggtaatctctctccaaaaactgaggacacttaccttccccatatattgagtccagctgtgtttggtggcccaggtgagtggcacagtgatttggtgtcttctctataggatatacagaatagtgtggcatttatgagatattggatacatttgtatgaatgtttacagcagttttattaatattttcctgtgcagttattattctgacttacgaatcttgtttcattgtgtttgaaaacttaggtactaatttcaagatgccaggacgttccagttcaaattcaggttcaactggtttcatctccttcagtggtgtagagtctgctctctcctccttgaaaaacttccaagcctgtatcaactctggtatggacacagcttctagtgttgctttggatcttgtggaaagtcagagtaagtaaaattaaaacctcttttgtgtctactttgaggtaacactgtgtggtggtatttatctgggggtgccttttgagtatccttgggggaatgatttaacccctctaggcatctgttgtctcattttattctacacaccgcagcagggtactgagggtgaaataagattgactcattcatgtgtgttcagacagttaagttccatgagaaactgcgctagaaatgtatgggcaaagatttgaagatcctgaccccaaggagcatacaatctaaagtatttgacatttgtgaactgtaaggtatataaatttattatgatattgttatttttcagtagtttatactttggtcatacttgattaaccagtagatagactaagcttatgctagggataccagcaaaggaaggcctcaacaaaaatgagaaaagttcaactttaatgaattttacctacatttgttcaatcaagaagatctagaaagatgtgatttgcaggccgggtgcagtggctcacccctgtaatcctagcactttgggaggccgaggccggcagatcacgaggtcaggagtttgagaccagcctggccaatatggtgaaaccccgtctctactaaaaatacaaaaccaacatggtgaaaccccgtctctactaaaaatacaaaaaattagctgggtgtggtggcaggtgcctgtaattccagctactcgggaggctgagacaggagaatcacttgaacccgggaggtggaggttgcagtgagtcgagaccgagccactgcactccagtctggacaacagagcaagactctgtctcaaaaaaaaaaagaaaaaagatgttatttgctttctttggagtagaatcgtttttattttattttacacatggagccagaggagcagcatgatccttttgttttgtttttattggcataggttttgagcaatttgtgatgtgccggggtgtgattttttttgtcctgactgatattgtttgagatttatggatctgtcagcttatagttttttgaatcaaatttggaaaaatttctgctactatttcttcaaatatatttttttaattcctctgctctcctctccttctgtgtgactcacatttcatgtatgttagatgggttgatattgtcccataaatcagtggaacttgatagattttttccagtctttttactctttagcttcaatttgaataatttctattgctaagttcattcatcttgtctactgcagtgtctaatctgataattccatttagtgaatttaaaaatttcagttactgtatttttaattgttgaagacataacaaagaattaagtagaatctttttttttagtcttccatttctttcttcattgtgtccatattttcctctacattcttgagtatatggagcatgtttataatagctattttaatatccttgtatgttaattctgtcatctctatgtgtattatgttgttgagtgtttggattttgttgtcttttttttttttttttcagccggaattttgctcttgttgcccaggctggagtgcaatggtgcgatctcggctcactgcaacctccgcctcccgggttcaagcgattctcctgcctcagccttcggagtagctggggttacaggcatgcgccaccacgcccagctaattttgtaattttagtagagacggagtttcttcatgttggtcaggctggtctcaaactcccaacctcaggtaatccgcctgccttggccttccaaaatcttggaattacaggcatgagcctccatgcccagcttgttgtcctcttttaaatagtgttggagtttgtttggtgtgcagctaagtgattgtggattaggctgatcctttctaggcttatcgttaagctttgttaggtcaagtctaatatagcctttatgttagggctaatttagccttgttacaaagcatggcccttctggagtctctcttgattgccccgagggttcagtgcgatagctctactctggctggatggaatttgagtgtctcccggtcctaggtcctacgtgactgaacctgggagttgttcactttatagctgtcagtatttgttgctcagcatcttaggactcagcatcagactcaaggggaccccagtgcagattcctagagctctttatctgcatagctccctcactctcttgcaaaccctgctggctgcctcagcctccctgaactgaagtctctgtctcctcaatccttcaagactgctgtgctaggccgagcatggtggctcctacctgtaatcccaacactttgggaggccgaagcaggaggatctcctgaggtcaggagttccaggccaacctgacgaaaccctgtctctactaaaaaacaaaaattaggcatggtggaggatgccagtagtcccagctactggggaggctgaggcaggagaattgcctgaacatgggagaagggggttgcagtgagccgagattgtgccactgtactccagcctggggaagagagtgagactctgtctcaaaaactcccttggattcctcctcccttgcgcagggaggaggccattgcaagacttttcccagttttcccttattgcagtaattacagtcctgtcccgcctttgtcctactgtcccacagctattgtttcatatattttgtttagtttttcagtcattcatggcaggtggaccagctccatacagttattcatttacggctaacagcaggtgtcactcataatctttttagtgggtggcctccaaatgttttaaccctacccagtctgtttttgattatgtttttggtgatcataatttagctttgatagataggcctggataaaagtcataataaaatcttaaaccataagagagaagactggaacataaccccttgggagattgtatcagtttttttcaggattctttttgaagattcctgggagttttagctacagagttttttttttctcttggttttgttttgttttaaataagaggtatattttgttgtaaaatacaacatgtgcaatttaagaagaattataaacatcattttttgaaaggttcatgctctaaagccaaagttggcaaagtttttctataaagggccagataacaaatattttcaactctgtaggccatgtggtttctgtcacaacccgctgttgtagtgcaaaacccaccatagatggtacgtaaatgaatgggcatggctgtggtcttataaaactttatttacaaaaatgggcagtgggccggatttggctcacaggtcttagtttgtcaacccctgctttagtgccgcagattgtcattaagtaatttttaaaagaaagatgtatttattttttaatatttggattaattttacagcaaatacttgattttgcatttaccaaaaaagttaatttaagaaaaattttgagcaagttatatgggaaaaaaagtgaactaaacaacttagacagacacagagtcaccaggagcctggacttcttatgaactcaatatgtatatgaatacatgcgtgtgtgtgtgcatacacacacacacacacacacacacattttaactaataccaggagtcaaaataacaaagtagtcaacataaactaaccaagtgactattctgcatataattcagctctaggttttaaagaggacataaacaagtattaagtagttcttcccttcatagagtttaccatcttagtgggaagacaaacacatattaaaatactaaaacaatgagaaaacagaaaagatgttataaagctgcaaataactaatatcaccactgatcttatcagaaaagtcatacgctctcaaatttataatggtgaacacaaatttttcaaagttctaattttttctttaaaactttcactttgggctgagtgtggtggctcatgtctgtaatcccagcactttgggaggctgaggcaggtggatcacgaggtcaggagtttgagaccagcctgaccaacttggtgaaaccccatctctactaaaaatacaaaaattagccgggcgtggtggtgcgcacctgtaatccgagctactcaggactcaggaggctgaggcaggagaatagcttgaacctgggaggcggaggttgcagtgagcagagatcaggccactgcactccagcctgggcgacagagcaagactccatctcaaaaaaaaaaaacaaacaactttcattttggccgggtgctgtggctcacacttgtaatcctagcactttaggaagccgaggctggaggatcacctgagttcaggagttggagaccagcctggctaacatgacgaaaacctgtctctactaaaaatacaaaaattacctgagcgtggtggtgggcgcctataatcccggctactcgggaggctgaggcaggagaatcgcttgaaccctgggggcggaggttgcagtgagccgagatcacgccactgcactccagcctaagtgaaagggcaaaattctgtctcaaaaaaaaaacaacaaaaaaaaactttcattttaccattagcaacaaatgctgttagttgttgtctttgaaattacagttgcacaggctcactttcttcatttttgagaaaatgtctttcagatacccaaacctgaataaccatagtttgtctgtgaatnnnnnnnnnnnnnnnnnnnntgttccagtctattctagtgtgaggttagggctgaaaagtgagataaaatctatcttccctgttcgaggataatgagatgaaacctcaagatgaaagaaatgttgttaactactgaatgtgagaaagagtgagaagttttaaacttttttttaaatgagtgactcaatgtcctgaagggggaaaagttcaattctttttttttttttttttttttttttgagacagagtctcgctctgtcgcccaggctggagtgcactggcgtgatctcagctcactgcaacctccacctcctgggtccaagcggttctcctgcctcagcctcctgagtcctgagtagctcggattacaggtgcacaccaccatgcccggctaatttttgtatctttagtggagacggggtttcaccatgttgtccagggtggtctaaaactccggacctagaaatccacccgcctcgagcctcccaaagagctgggattacaggcatgagccaccaggcctggcctatcaaggacattcttaaatgaaactagcatttgttttactatgagtgcttggtagagaggaatacaatgatctattagagtgcaacagtttggtgccactgctctgatttttgctaaggcaccagcagttttttccacaattgcttttgcaccattagtacaaacattcaacatttgtactaatggtgcaaatgttaaaaaagaaaaagaaaaacaaacaaacccagacaaatagcatcttaaaattatgatgtaaataagctaggcctggtggctgacacccataatcccagcactttgggaggccaacctgggcagattgcttgagctcaggagtttgatactagcctgcagcaacatggcaaaccctgtctctacaaaacatacaaaaattagccaggcatggtggtgcacacctgtagtcccagctactcagaaggctgagatgggaggacagcttaagctcaggtggcagaggttgcaatgagctgagatcacacgactgtactccagcctgggcaacagggccagagcctgtctcaaaaaaaaaataaaaaaaattatgatgaaaatagtttcgacccatggatcccctgaaagggcccagaagaaattacgatgaaaatagttttgacccacggaccccctgaaatggctcagaagaccacactgagaacaaactgagtttgattgcttatgaataggaggtagatgacatgagaagtcctctgcagagagaaagccaagggcaatcactcccactggggtaattcagcaagaacttgttaggggagcagtgttaatgtgataccagactgaggtgctgtccaaggacccagagagtaggaaaacaccggttgtttaaggaaattggagggtagatcagcctgtaacagtagatgaaagacttgtagaaggctgatactaaggcagccagtatcagcacttaagtgcacgcttgctattgggtccagtcctaactctgtcataagttctgtaactttgagtaaggtacctaacttctttcagcttctaatttcttatctgtgaaataggattaaaatgcctgcttcataagattgttgggactaatgagataatatatgctaagtgctctcagccacaatgttaattcaatagctatcatatatgacaaccagcaattagtaaaatttgagggtcagaacttagaagaagggcctgtgatgtgaagagggtaagaaagatggatgagtttggaagtctgtgtaagactgagtccagctaagtcactaattcatcagatatgttgccaaaactacaaagataaataaaggtttcttcctttgagttgtttacagtctaggtaggaaataagacatatacttgttattcaatcattaagtgaacattgatggcctataatgtgatgctttgccaaggagtttgaaccttatcattggaaggtttaaagtagaggaaaaaatatggtaagatccagttttagaaagataactgtccacagcagtactgaggaaggaaagacttcaggtggccaaagaggagattatgtcagtagctcaagtgaaaaagaaaataactttgactaaggtattgtaactaaggtaaaaaggatttgatttgtgtgctatgtatcttataccctcattgtaatacaggcataatagtgtaatagatgattgcttgggttcttatcccagtgccctctcttatctttgtgaccttgggcaaattctctaccctccaatttgcctcaggtttcctatttataaaaggcattattgtggggattagcgagataatattttacaaattacttagaatagtagtaagtgctcagtaattgttagctgttactagtaatttggtgtgcatttgagtttgagttgaccggtgggtgtgttggacaacagagaatggattgggagagattaaagtgcagaagagcaagtggggaatttcatggattatcccagaacagaaatactgttttccttagttttatgagattgttgactttttgggttgcctgatttcatctcaaatcagagtgaactttgataaaccaaatgataatgatcacataggtatcattttatcactttgccctgacattttcctgttgttgtattattaagttattggtaaaggagattcttgctcccaagaactagggtggtgatgtgttttattttgtttcttattggttgcagattcctaattcctataccaggtgtttgtccctgttcaactttctagcttatttgaaatgatcacctttgcctgtgttacgttagaatatatggtgtctaggcaattagactcaccactaccatgtttattcatttttctctaaatttgtcgatattctagtattaccttcttctttgacctaactgggaaatgaaatttgttacattaggagattttttttgagattaccgaagcttatttttttcaggtttttgagtttattatgtacttttctgccatcttacacagaatatactgacctaattaactggaattatttttaaatcatctttaagtagttttagtaagcgctttaggtttagttaagtaaatttgaggaatctcccttctctaaaatgttaatgtacctcaaagatgtaaactacatctttgtagttttcaaagatgtgtcatctcttctcatgcctctctgccagggcaagtctgtgaatgggcttcagaggtttggttaatgctctgcaattctacaaaaatgtatgtgcatgaggattaaaagttttaccagattcttgctaaatatttgatagcaacatttagaagtaaaggattaaagttttctctatatattgcttttctttctgtgatttcggagctatagggcagaaagattacagttactatggtcaggcagttaattgggtatttgttgagctatgctaaagtatggtgatgatgatgaatttgttacatacttaactggtgctctttttacatgtgctatttcatttgatcctaacagtaatcctgtgcagtagggactgttgctgtccccactttacacatgagaaaaattgaggcttagtgaagttacatgcattttttaaggtcacaaagttagtaaatgtttgagtagggatttgattataagcagtctgacttcatagtttctgcccttcaccattacacttcataaaaaatgtattgtgccagcgtcatggcctgtgcagtcaaatgacatttagcgacgttttgcttagataattttggttgttgttgttttttttttttttttttttttttgaggataatgttatctgatttttttttttaaatacccaaatgaggttgcatgctttttctgaaacatcctctcatggaggtcatgtatggtcatggggggaaggagctgggacctttcagggcctttgtactgaccctagactgtctactttcagttcttgtaatggcaggaaaagaaacccctgtttggctaagcaacagctctcatgtttgctcttctttgcagctggttacagtcctgactcatggaagtgattcatcaaattgattgaatgatagtctgttctttcatacatccacaacttgtgttctggctaagaatcatcacctttttagatctagttccttttgtcttaccttaatccccacgcagccaaaaaagttttcactgtgtggcagttacttcagagttcatgatgagtaaaaaacaaccagcaaagtgaaaaattacatggtcagggacatttactgccctcatgaataactgaccttttacatttgcaaatgttaagcatttccttgagagaatagttttaaatccgggtgctttgggggtaagattctagttttgttcctgaataagacattcttaaatctagaaatttggtaagtatgggtgaaaaaaaactcccagaaaattgtgatcatccataaccctatcacccatcaccttattttatgaaaaagggataagcattttgcttaaacctttcatgttcaaaatgttttgaggctggttgcggtggctcatgcctataatcccagcactttgggaggccgaggcgggcggatcacttgaggtcaggagttccagatcagcctggccaacatggtgaaaccccatctctaccaaaaatagaaaaattagctgggtgtggtggtgtgtgcctataatcccagctacttgggaggctaaggcacaagaattgcttgaacccaggaggcagaggttgcagcgagccgagatcacgccactgcactgcaacctaggcagtagagtgagaccgtgtctcaaagaaaaaaaaatggtttgaaaattacttgataattggatatgtcaatacaactgacctgatattttcagggcttgattttttagaaagacttacattctggatttttcactgtgttgtgatatatttctccattagagcactgctttttgttattaggagtctagttgagtcggggagatttctttttgaccttgttcctgtcttttatttcataattattgaatagaaggagtaactagaagtaggtggtttctagtggtgagtggtggccacaatgataataaaaataacaataaccctaagaagccaatgtttgtatgcttatacagcttttataactggagccaactataccagcaaaatagcattataacttaaattagtgaagattattaaacatatatacttaattatgctgtatatagtactaaaagtaaaaggcaatgcctacaccaggatgtagagaaaagggaaacccttgtgtattgttggtgcgaatgtaaatcagttcagtcattatggaaaacagtttggaggttcctttaaacattaaaaatagaactaccatatgatctagcattcccagtaatgggtatggtttccaaaggatgtttgtcaaagagatttctggccttctcatattccctgcaacattatttccaatagccctagatccagaggcaaacctgagtgtctatcaatggatgaatgcataaagaaaactgtgctgtgtatacataatggaatattattcagtcttaaaaaaaaaatgaaatactgtcatttgcaacaacatgggtgaatctggaagatgttttgctaagcaaaataagccagtcacagaaagataaatagtgcttgatctcactcgtatgtggaatctaaagaaggtgaactcatagaaacagagagtagaatgatggttaccaagggattggggaagggaagggtgggaggactggggaaatgttggtcaaaggatacaaaattaccattaggaggaaagagttcaagagatctattgtataatatggtgactatagttaataactattatatacttgaaaattgctaagagagtagattttaagtgttttcactaccaataactgatttaagtatgtgaggtattgttaactagcttgatgtagccattccacagtgtttacatatttcaaaacaaaatgtataccataaatatatttaatttttgtcaattaaaaataaatttaaaagtgaatatatattaacagaaaatggggggggggtgagtcaatacctacagaatatgaaaaatccaactttgaaaaactcagttcttttttgctgatatctttgtgtttcctaggactgtgtttattcattcattttagtgttaccattgtagactttatagttaagtaaagaactgttgtggtggctcacacctgtaatcccagtgctttgggaggccaaggcagaaggatctcttgaggccaagagtttgagaccactctgcacaacatagtgaaaccttgtctctacaaacatttttaaaatgagtcaggtgtggtggcatgcacctgtagtcctagctactccagaggctgaggcaggagaagcccaggagttcaaggctacagcaagatatgattataccactacacttgaacctgagcaacagagaaagaccctgtctctaaaaaataaataaataaaaatatatagttaaatgggtaaaaagaacaacttatgagaaatacatttctgggggaggagattaaagtgtactaataaaaagaatcataaggaaaatgttcacaatgatgtggattagaacctgaacacaataaagtgtaaaccaacctttcaacaccagtttaggtgtgcagaaagatttaccagaatgaaattcataattcatttcccccgtcatcctctcctttctcatcagcaggatccaccatgttcacatagatgatctgttaatatcatcttgattctgaaagggaccttagtggttaggtaatctctcatgaatgcttttgcccattggttgttcagggactgggagcttttcagaatgagtgaggtttagcaggttctaggattgggtagagggtagaggagtagtgtgacaactacttttatgaatttgataggattcttctccctttggttgtgaaccaaaagaagtaaattcccagttattaagattaaatctaattagatttagacttgtttttagattgtattctcaagaagttacctataagcacatgatcttctgaaaatctgaacataaatattttgcccggtatgtctaggcccttgaaatttagaattgcagcatgtccttcatcccactcctttcagaatctcttacccctttctctgctttatttttctctcgactgtttaatacttaccactacctcactttctaacatactgtataattgctttattaatgttatttattgtctgtgtctgccctgaatgtatgctctgtgacagcaggggtttttatcagatacccttacccgctgctattgcctataggtacatgatacacagtaagcactcaataaatgaaagaatgtgtttaaaacctaacaggaaaattactataaaaatttcctctgattgtctaactcattcatatatacccacacccatgttcatggattatatatgcactccatgcctataccccatccatatccatgtatacatacatacgtacatatgtatatacagcagtgggtgattttgccctccagggttcctttggcagtgtctggagacatttctggctgtcacaactcggggatgcggggagcatgtgtgccctggcctctaggtgttcagatgctgctaaacagccttcagtgaatgggacagcccctgcacagcaaagaactgtgcagcctaagctgtcattagtgctgaggctgagaaactctgatacacacactaatgtatgcatacatacatacatatacacatacatacacatacatagtcactggtttaaaaaatctacttagagaatttttgaaatttgaagtggaaaacataggcaatactaagggttctttaggtaaataatacttggacctttattgctctttttgctggcagttaaggcttttccttattttcagagttgatagcattcctcgtgtttcccttatattttatgtttctttatgtgtcatatttccctcactggactgtatgtccttgagattaggattcccatacagccatcctcatgctccaactctcagagcttggcagtggactttgtacattttaggttctctttaaatgctttttgagtgaaccagtcagtcaaccaagtaactaagaaatttgggtgttggattgtagaagccacggtaggaatattgactccacccatggaaatgggcaaatgtcacaaattagaccctccccaacagctggagagctggttatgaagcagttaccagcacccccctgggcatatctgacattgaagcaaatttgcatttggtagacaggtttgggaaagggctttaaaagtaacaaagcctatatattggaggagcttcagagtcatcctttttctccaccagtgagattccatgtacattgatttatgtcttggaaatatgtgaaagatgtttctattaaatctttcaggccgggctcagtggctcacgcctgtaatcccagcactttggaaggccaagtcacacagatcacctgaagtcaggagttcaagaccaccctagccaacacagtgaaaccccatctctgccaaaaatacaaaaattagccaggcatggtggcagatgtgtgtaatcccagctacttgggaggctgaggcaggagaattgctagaaccaggtgggtggaggttgcagtgagccaagattgacagagcgagactccgtctcaataaaaaaaaataataataaataaataaatctttcatggccattagtatattgtttagtcttgacctgggagatgcttgctgatgcaactgtttacaaaaatgttgaagtaggtgaagaaaagggagctgtcatagcctacaataggcaagtatgaaataaaggtgtatgttgtggaaatcactgaaagaggtcaatatcctcatcctcactccacagaaggggaaattaggctcattgaattgaaacaacttaccataaggcacacacccaagttgcaaattgggaatttgcatttggacccagtttgcccaactccagccccatgacctcgatttatctgtagtctctttcctttctttcctctttctgctaaccatggatgaatggcagtaatccttaacagctgttagtgatgtatcagacatccagttcttattgcaaatatatgaggcttgtaatatgaattctattttacaaatgacaaaacttaaagctcaaaaagttaatttttggaccaaggtcacagctaacaaatggcagaacatttgaacttggcaaggcagtatggcacacaggctcatacactgctcaccacaggtccttcagtgcaatgacaatgacaacaaagaaagttaatttttaaaaatgagatcaaagattttcttccttatgttaaaaaaattattattatttccattttacttgacccagctttctgtgacttatttttactaacttatttctgtgtatagggaaggtttggaagaaagccttttgtcagaaactcatcctattatggatagttgcttttataatgttagaattggttgctctgtgtgtgcgtgtgtgtgtgcgtatatgtgcacacatgggagtgtctgtgttttgaaaggacaaaataaaaactaatcaatagagcaggtctttgaaattccttaacctacttatgtcattagcagtaatgtctgtgatgttacctgtcatggagtcttgagcttgcaaggctagcttttcagaggtgatttattttcttctaagtgatatgtttgcagtttgagccacagaacaaagcatagtgcctaattatcactatatgggccaatggccatactgaagatatatctcttgatccagtttttttacttaagcatataacttttttttttttttttttttgagatggagcctctctctgtcacccactctggtgggcagtggcatgatcttggctcattgcaacctccacctcctgggttcaaacagttttcctgccttagcctcccaagtagctgggactacaggcgctctcctctaagacctaaatggaaaagaaacaatttagcagagcttcatcagatttgcttttttcttgattattttataatatagttacacaaagcagatgtatacagtggacttgcagtggtgtctattagcattagggtagctgctgcttaatttaaaaaatcaccaatattcagcttctttggctttttatttttttttctttgagacagagtcttgctctgtcacccaggctggagtgtggtggcatgatctcggctcactgcaacctccacctcccaggttcaagcaattctcacgcctcagcctcccaaagtgctaggattacaggcgtgagccactgctcccagccttcagtctctttggctttttgtgtgtttccaagtaagtgttcctccttcctaagataccataatttgccatgtctcgatatctcgatatcctgataccagttaatgcgttttctttgttccatggggctttttgcatttataccttttttatttttattttatttttttaagagatggggtcttactctgtcgcccaagctcacagtagtctctactgccctggctcaaatgattctcccaactcagcctcccaaagtagctgggaccagaggcgtgcaccacgatccccagctaatttttttattatttttagagacaaggtcttgctatgttgcccaggctagtcacaaactggtcttcccttttaactaggtttcctgaggacaaagatctcagtgtgttcatctgatgtcttcagagtctgggactttaatgcctattaggtgttgaatccatatataaatgcgttagtaactggctttcaagattgtgttctcttaatacaaatatctggatcaagaatgtaggaagttactttccaaaatgagaaaataagcccttttgttaatttttgaacctaatttttaaagaccgcattcaatttttgtgtatgaaatgtcttagccagaggttctcaaacttgagggtgcatcagcatcactttagagagcttgctgggccaggcatggagaagggtcacaactgtaatcttagcactttaggaggccgaggcgggcggatcacctgaggtcacgtgacctcagcctggccaacatacccaaaccccatctctactaaaaatacaaaaattagctgggcatggtggcacacgcctctagtcccagctactcgggaggctaaggtgggaggatcacttgaacccgggaggctaaggtgggaggatcacttgaacctgccaggaggcagaggttgcagtgagccgagattacaccaccgcactccagcctgggtgacagagtgagactgtcttaaaaacaaacaaacaaacacacacacacagagattgctggaccttgccactagagtttcagtaggtctcgaatgagtctaagaatgtgcatttctgagaagttcccagggtctgcgggtacactttgagaacccttctctagtcagtatttcccatttggtaggaaataccactaggtggcaccagaacacttcttatgaagtagctattggctttttgaacagtgcttattgcacagtttaggattatataaaagatacaatcactaaattattggaatttggagcctgaattatctcatgtatataaaaagtaaaaatgtgttgattctattagaccagagaactatacgactattaaggttaaatttttagatcaactcttccaggaatgaggactatacctctcacctttgctgctctccttttcagttgtgtgggttaatcagtttcatttaccagtgattgatgcagatcctttcacaaaataaaaataaacatttcatatgaatcataagtatttattcttccaggttaatggatcttgattttgttatcgattacattttaaaaccacttttaaaagacttatacatattgtgcgcataaatttcttgtaattttgtccttcctccagtggcccagttgtatttggggcagttttagaatgtcaaaaagggtgaaatgtgctttcctattggcttccttactcagaaagttgagtagtttcctttttaagagctattgagaggaaagttttggctgctgttcacctcatctcacctcctgttaccgtggaatctcactccataaatttccaatcattccaacacctccagattttctttcctccaccgactgtaacaacctgaaagttggcatggtttctccacatgatggcgtgtgtggaaataattacttgctgtgttcccctgtttgctaagctctcccattcacattaggatgtcactttgtgaaacagtaaatgagtcactttttagtttttaaaacagcgtgtatagtatctgaataccatctgggtttttctagaatcctgagaataatttttctattaattctgcttttttgtctttggagctgaagcttggtttaggtttcagtggcctaacagggtttgaaaatgaccatcacagaaaaaatggaattggagtcactcaatcagattaaaattagactagcactttattatatctctttgatcattggaaataattgagactagtttaatgctaagcaaagatgacagcttatggaagaagtagatagaacagactttaggattatttttgagacatcagattcctttttaaaagacataaaattttacgtcttctagtaagcagaaaggagctttttgtagattggcaattaacatagctaaaccaacttgattattctagagaagattattttattatccagacctattttttctccctcttctttctgtactttataaatgaaattatttgttatatataaatgtaaagcattatttatatatgtaaagcattattatttatatatgtaaagcattatttatataaagtgttagccacatgtgtaatttaaaattttctgctgtccttattacaaaaagtaagaagaaagaggaaagattacttttagaaatgttttatttaaacaaatatgtctaaaatattttaacatataatcaatatgaaagttactaatattattttgacttttttgatactaaaattagaatcttacagtacatgtcaacctggactagccatatttcatatatttagtagccacatgtgaaaagtgggtactgtattagataacagcacagatataggttatttcatttgtcagtgactgtgtcagagaagggcaagaaagcataaggatatttaaatcaatcatcatgtaacattttagaagttttggagagtactcaaatcaaaccagtcggtaaaacgagttattatctgttgatttcttttgtatttgtcacttttctaccctaggtgtgattggtattttaatacataaaatgccaattttaaaaatagtttagtcagcctaaaatgacttacttctgaggatcctgctagtatttgcttctgtttgaaatgtcatgataatttgaatccacatctacagtactttcatattttgtggctgatgtggtaaactagtttcttacgatattgggcaagccagaggttaagcctgttaacttcagcagccagaatactgtactctagttgctataaacaattaggcctgtcagcaattgaccttggaaatgctaatttgcttgtccctgggtgctgcctcaggcactggctttctctctgtgggtgggagttatgaacctagtttggaggagaacttgaggcatttggggcaagctccaaacagatgtgcttcttgcttcatttttgcatgtgaccaagtcgcaagaggcgcattccttgcatgaatttctttgaaggccttgtagaatcagacatgtatgcctagactaaagttgagaggaagctttattacttttgaatttacccttccctcttcattctactgcacatctgccataacgaaggttgattgaaaaatgctacacagtgattttcatcactatttcattgtatttcttaaacttactgaaaaagaacttggaaggcatcttttattaactcttttggttttgtgtttattactactattatagtagagccaggagaaagtggcctgaataagtgaggagaaagaaatgttagttggaaaagctatatatacatggtgagaagttataggtagcgtgctcagtagatgaagaagggaaagagaatatttataaaattcagagttactgtctttttaaactggtggtgacagcagtggcagattttactccaagacaaagatttgcgcttcctcttcttttgggcaggtaattttggacaaggtaattttgtccctttattgtacaatactgattcaaacatttatttgaggttggttgattgccactgttgttaggtaattgttagcattttatgttgatcagtcaccaattattattggctcatgccctcaaaaggctaataattttgttagcagataaggcaaataggtatccatgcaaagatcaggagaactacatggtagtaagtaatgtgtgccaaatgaggagaccatgaatctgtatgtctcaatcaagaatctgtgaatgtatttttacattttatgacctagcagcctgattctgtatcccataggcatacatcttttgtagactctaatttaataggcaacttaataatagccaacttgtgatgctttttgtgtacctggcatgttataaatgccttatgtgtattcattcatttaatccttacagaaatactgtcaggtaggtaggtatcattaccattatacatatgagtaaactgaaccttgaggttgaccaaggactatatactgtatctctgaaggagtggtttttgttttttaaccacaataatggatttcagattggaaatatacattttaattatttactccttacatattctcacccatcatcctttgtaaccctaaccccttcccaattgcagtaagctctgagataagttcttacctacgcattattgacctaggcctgtgctcagtgtagatagctcttttgcagagctctgacaccgttatgcctgaagatgagttcttcattaaaaccatttatagagtccattctatgccaactctgatgattgacttagaaggttctctggctgagccaaaaaaaaaaaaaaaaaaaaaaatgctgcctattatatgaaatgtactatgctagaaatacaaagatatgaagatacttcaacaaatctctagatccttactaggattgtaagtcttgattaccgtgaattgacttcttggatcatctttgtttgattgtttctctagccataaccaaagcatctggcatttgcttcccgaaaaatggtagttattaccttctacaactattttaaacccttgagcataacttacagaaggtgcatgatgtcactggctatatccccttatactctatatactccagtcatggagcctggtttaagtgccatcaacatatgctctttaagcctcttttctctgctcacatgacttcctctccctagaatgccctttctctgttgagtgctttgagggcaccaattcatctttcaaggataagcttaagtatcatcttttttctgcagacattcctctcccacccaaaccaaattgatctcttcttgggttcctctttgtttgttgtacattcgtccatctaaacagcagagcacttctttgcactcagttgtatttcaactgtatactatatatatttcaaccttatactttagcataaggtattctcaccactagatacaggggtttgaaaagaccagttaataatatcctgtttcccagccaagttggggcttcgtgttccagtctgtgttgcactactcaactctgccattttcactcaaaagcagccataaacaatatgtaaacaaatggatgtgatttgaatagtagtgggctgcactttactcatccgtggtctagagaagtttgatagttttgtctcatgtctttaaaggctaagaatgggttaaaatttcataaaatcaaaatataaagtgatacctgaaaagggattatagggaagataacagaaatggttcttgcaaatatatatatatatttttctggccaactcattaaatgactggtaggaaataatttttacaaagagtacgatataagccttgacaacttctatatcatgggttactgaaaaatcttacctataaagttctcctagactcaggtgtgtttataataaagtttatgttttagtttcctcctttccaaaagccctttacattttctgaagttagttccacaatatttactaagttccacaatatttactaagcaccttctctctgaaatataaagatatggagatatcactcaacaaatttataaatcttattgcagttatttttctctcttaacaatcctatgaaaatgaaggagacacttgacagatgaaagagctaaagctcgaagggttaagtgacttatctgaagtcacaaagtttgagatgctactcacatccagaatatcttctgcagtgctaacccacatgtgtacatgcgcacacgcacacaaacacacacacacaagtgtgcatcttgtgtagatcaacatgtcccatgccagtcctatttgccgttatatgtagagctattaagtttggaacattaagtaaagaatccctcattataggatgcaattttgctgtaatgaaattcatttcagcagataattaatttagtatttaatcaccttaaattcttcttaatagtatttcaccttgttttttaaaaaaattcctctcagttagtcactccctctaaatcccattagcttttttattcttttatttggtgacaataacaactttattgaggtatgattcacccatttaaaatgtacaattttgtggttttcagaatattcagagatatataaccatcaccacagtcaattttagaacattttcatcacttcaaaaaaagaaaccctgtaccctttagctattgccttcctgttttcccattctcactattcctaaggagccactattctactttctgtctctatagatttgcctatttccagcatctcatataaatggagtaatgtaatatgtggtcttttgtgactggctgttttcttagcataaggttttcaaggttcatccatgttgcatgtatcagtaagtactttattcctttttatagctgaataatatttcactgtacttctgttaaatttattcataaacattttattctttttgattctattataaatggaattgttttcctaatttcacttttggattgtttattgcaagtgtataaaaatacagttgatttttgtatattgatcatgcttgcattctgaaactgctgaactcatttatttgttctcatattttgattttttaaagtggattcctcaggatttctctctctctctctctctctctctctcaacaaggtctcactctgttgcccaggctgaagttcagtggggtgatcaacagctcactgtagcctcaaccttctaggctcaagcaatcctcccacctcagtctcctgagtagctgggactataggcttgcaccaccacacctggctaatttttgtattttgtagagacaaggtcttgctatgttggattggctggtcatgaactcctggggtcaagcgatcctcctgccttggcctcccaaagtactaggattatagacatgagccactgcacccagcctcctcaggattttgttgttgttgttgttgttttttgagacagagtcttactcttttgcccagcctggggtgcagtggtgtgatctcagctcactgcagcctccacctcctgggttcaagcaattatcctgcctcagcctcctgagtagctgggactacaggtgcccgccatcacacctgactatgttttatatttttagtagagatggggtttcactatgttggccaggctggtctggaactcctgacttccagtgatcaccctgcctcagcctcccaaagtgctgggactacgggtgtgagcccagctaggattttctgcatacaagatcatgtcatctgtgaatggagatagttttattttttcctttccaatctggatgccctttatttctttttcttgcctaattgtcctcgatagaacctgcagtacaatgttgagtaaaagtgtcaagagcatacatcctttttactgatcttagggcaacagcatctttcaatattaagtgtaatgttatctggagagctcccttcctcctgcagtggccttctaacgccctttattgagaaagcttcacatcattctcactgtaagagaaaatgcttcaagcacttccatctattatcacagagcgggtattgaagggtgaattttgagctgagaggcaattaattgataactggcacagaacatgaataagcaagtggaataaagctgtgaaggtgctgtgatagaaacctaattgcaggaaacagtgaaggcaccatggagttagtggtcaattctagcagaggacctttagtagaacttctgtactggaaatgaggacattaatgatgagtaggcattccctagagagtgggagagggtgtttctgagggtagcaaagatgagaagagctgtgagcagcttggtgtcaagatctgtgaaagctaacaggttagtctgccacagtgtggcaggatgttggcagaaggtgagagcttatgagtcagagacaaaggtctttatcacttgttgcacattgcacatcaaacagtgtgagtatcatagttcaccttgttgtcccctctgtcccaagtcctacattggtgaggaagggcccagggtgatactgtggagggtttgtgtcacagctgaggaacttgggggctaagggacccagatttttgtaacgagcagtaaacttccctgacctttgccatggaggaagacatcatcttattatactgccctctgatgtagaaggaggcacaacctcaatcttccagggttttgttcattatacaaacatccttgaaaactataaaagggcagttagtcatccaggcggggtgactcacacctgtaattccagcactttgagaggccaaggcgggcagatcacttgaggtcaggagttcgagaccagcttggccaacttggtgaagactccatctcttctaaaaatacagaaattaagctggcatggtggtgggtgcctactaaggaggccgaggcaggagaatcacttcaacccagaggcagaggttgcagtgagccgagattgcgccatagcactccagcctgggtgacagtgtgagactctgtttcaaaaaaaaaaaaacgagggggacagttattgtctttgctcacaagatgtgaggagatgtgtgagaccatgaggaatagtgtcccagcacctggcaggttcagggaactgcatgttaacttcaggttgggcctttccaagaattttaccaccacgtattatagcttcagcacttactacctcaagaagatgtagtaccttacttgatgcacgaaagtcctatttgctgctggattccttctttccctttttggcaaagagggcatcatattctgttggctaggcagaataacctcgagctttcagaaacaattttggaatcaggtcgctaggttcaaacacagctctggcaattattagcattgtgtaagttttggttctctcatttgcaaaatgaggataatattgtaaaatagcagttaacatctaataagtatttaactttgtacccacacacatctcccttattctcactttatttaggattgatgtgagaattaaatactgtatataaaatgcttttcacttggcacacagcgttcttattttatctgtcagttattttgttttgcttataattatttggttctttcgcaggtgagagaggtggatgctttggagcttttggctcagaaatgataatgtacataacacaggcagccatgagttaaaatgcaagttctgctatctgctagctctgtgagtttgaaccagttacttcacttctttagcattcttttccatgcatgaaaaatatggacattatctccttttcatggttcctggtttgatgaaacagttacatgctttgctgtccaagatttacttctcaacttggttgatcagcctgtaaatgcttgctttggttataaagggaattagtggaaaaagaatttaaagtgtatgtcttactgttaggatggggaatggcactgagaatgtgtgctgaggttgggggagtacatgatagtaagggccatgtgtgtttctgtgtggggggagattgtcttcttaataggaaaaaatgatgtttatgatatggtttaagaaacaaaagtatgttctagttttagaaaaattagtatgggatttcatttcaagcaaaaaaagatgagtgctcctgtgggatagactaaaataggcgtttaaaccagttaacaaagaaagattatgtaatgtgttacatggaagatgcagtttttgttagttgtctccctctcttcttctggaatggagccttccagagttcttgggtcgttctggagtttgttgagcattaccctgtatctgccttatctttgttttctgagtggtaagcttatgaggggtttggagtcttggctgaaacttaataatacaggttgagtatcccttatgtgaaatgtttgggaccagaagtgtttcagatttcagattttggaatatttacatatacataatgagataccttggggatgggatccaagtctaaacatgaaattcacttatgtttcatatacacatagcctgaaggtaattttatacaacattttaagtaattttgtgcatgaaacaaggtttgtgttaagtacttatgtgtggaattttccacttgtggtgtcatgtcagcgctcaaaaaagctttggattttggagcattgaagattttggatttttgaattggggatgctcacctttattagaaatacagcattgactaaaatagacatggccattgtgctttgagcagaagctggagagacttggagagggccagactagtggtagtaggctcttgtaagtcaaattaagaagctcttactttagggcaatgggaaggtgttaaagagtttaaaaataggaataggataattttattttgcattattctctggccataatgtgggaaatggcttcctaggaatatgcctggaggtgtgcctaacagttgggaggttgttgtagtagttcccagctattaggtagtagtgacttggactagaaaggtggtaagggattgatgagaagtagatcaatttataaaagacaaaggaggagtaattgatgaaacttgatggtttattgaatatggaaattgaggaaaaggaagaagtcaatggtgatactcaaatttctgacatacgcatctatgttaatggaggccccattttctaaggtggtgtgatgctttgctgttgctgctggaacaaagtaccacaaacttagtgacttaaaacaacacaaatctcaagcctgaagtgaatcttaactgggctaaaagcaaagtgtggcagggccatgtgcctttctggaggctccaggggaaaatcattgtcttgccttttccagcttctagaggcagtgcacattccttggcttctagccatcttccatcttcaaacctggcaatggcccattgagtctttctcatcctgcatcactatgacattaactaacctgcttttctctttcattaataacgggccttgtgattacattaggtccacccagataagcctggattctctccccactgcaaggtcagctgattaacaatcttatttccatctataatcttaatcccccctttccatgtaacataacataattgtggcactgggggattattagagggccattaatctcctcacagcagataagaacacgttttacagaggaaataaatttagttttagagatgcattcaagtggggatgacaaataaacagttggtttttgagcttgggataaagatatagatatgacaaaagcctatacatgaaaattgaagccatagaatgaatgtttgtttcttaggtggggagggaatacgtgaaatgacaagaaggcccgggccagtgtccttagggtttgggtaaagttgcaggtagtgagattgagaaggagccactggagggtaggaggaaatctagaggaatttgattttaaggaggttggtaatgacctttatagactattgtgtgtttggtctgaaaggatacttaaacatctttttaagcctattgctattacagatcaggaaattgaggcccagagagatgaagtcacttgtctaagattgtataactagttaatagaagtgcttcttcattcctacttagtttatttgccaccctgcaacccaggtccattaaatcttttcattttgaagatagtgttaggaaaagatttggctctgtgtgtgtgtgtgtgtgtgtgtgtgtgtgtgtctgtgtgtttcattgatattctgaatactgagagcaaattgctggaatgatgtctgactggtgccttatttacatgcaagttaaaaattgtttatactaaataatagaattaataattactttttaaatcatgtaaacttttttaaatgcaacttcatctctttttgcagtttctttcacctcattttgcaatctctctctatcctttttattttttcaataagttttttattttggaatgatgttagatttaccaaagttgtagatagtggagttcccatatacccataccctcacacagttccctcagttgttaagaagatcttatactaccatggtacatttgtcaaaactaaggaacaactctggtacattcctgttgactaaactaaatagtaagctccagactttatttggatttcactgatatccttttaaagaacgttgtctgggatccaatccaggatatcacattgcatttaatcatcatcttcgtagacgcttcttagttggtttcgcttttttttttcttgtaatcctgacagttttgaggaatcctgcttaggtgttttgtagaatgtctctcagctggagtttgtctgatgtcttattatgattagatttgcgttacaggtttttgggaagaagagcacagaggtcaagggcccttctcatcacgtcatatcaaagctagtgcaagtcatcaacatgaccagtaatgtcaaccttgatcacctggccctagtagtgtttgtcaagtttctttactggaaaggtacttttttctttcttttccctctacatactgttttttggaagcaagtagctcgctgtatccacactcaaggggacataattaaactctacctcctggaggagtaattatctacataaattatttgaaattctgtaaagagttttgttttctctgcttctgcccctgccttaggatcagctatttttccaagggccctggttctttttgattggaaagtggtattgagaaaccaagatctgggctccagatgtgcttgctgctaccagaaagtgactgcctctaagccctttcagcagacagagctaggaaatatgtgtatgtaggctaatgtatgtgtacatacatacctgtcacttgtatgtgtattcatctgtatctatattaaggggaacatgtgttcacaccattatcttcaacgctaatctagtgctgcgtggttaaattcttttctttttccctgctgatttgtaatttccctcaccaacattaagaaactggactcccaccgtccactgtacatttgcttctgtgtgtgcctccagtatacatgtaaagcattttcagaattattagcctgtgcttctgtgacaaacaagttcatcagctagcttagggtttacggacagttcttttgcctttagtgttatggttttcagtcagaacaccatttccaaggttacttaggtcatttccctttgttctccacttccttcagtgacatttgtcatgcatttgcaatacagttacattgttgtcatagtctggattctattacaggatcccctcattcctgattgttggcattgtggtagtttattattattatttttggatacattataattctttgtgagtgaaatttacatgggtcttgacatactgcaatctctttttgaaaatatatacgtacttggaaaatatacgcactgaagacatactagaatgtttgctggcagcagtgttaaggctaagaccagagcagtgaatgaagctgcagtcagatttataggtcagcaatcagggttaaagatgttctgctttccgaagtcagaattcactcatatataacaaaacttcagtaggcaagagcctacagatgcttgggtttagagaatgaggcagatctcaaatataaggccaagaattgagttacatcattacatcaggatatagatattggaacttatgcacaccttgcccagccaacaggtgcaacaccatggtagcttttcattgagttctaacgtggaaaaaaaaaatgcttggagattgtaagtacttgagaggagagattatgtctctttgaaacccctacagaaatgtttcttaaactgcagtcttagaggcacctgggatgtatattttaaaaatgcaaaattggagcttctgaaagcagagcccagaaatctgcattttaaacaagcatcccaagtaattctgatacatcctgaagtttgagagccctatcccctcactttgaatggtgaggtgccttgcacaagtaggtgcaccctgtgtgtttactaacttgaattgcaggtaagtaaaagttcttaagttccagaattcaaatctgggcagcctgtctccagagtctatgttaacaacattgtaaaagctttgctttgggggattcatgtcatgcatccttagagtttctcaggtaaattaagccaagaaataattgccattttggtgtttcagcaactaaaaatatatgtgtattcatattcttcttcttcttatggggagttggtgggtacaggatcttgctctgttgcccaggctggagtacagtggcacaatcatagctcactgtaaactgcaactcctgggctcaagccattcttccacctcagcttcctgagtagctgggactacaagcgtacaccattgcacctggataatttttcaaaaaatgttttgtacagacagggtctcactatgttggccaggcttaggcaattctcccacttctttggcctcccaaagtgttgggattacaggcatgagcctctgtgcctgacctgttcatattcttctgtgttcagctctctaggaagcagtgtgatagcagtgttcttgaatcctaaggagaggcatgtatcttaagacaatttttaaattaaaaaaaaattttggtttttttttttgagacaggatctcattctgttgcccaggctggagtacactagtgcagtctcagctcactgcaacctccacctcctcaggcttaagcaatcctcccacctcagcctcccaagtagctgggactacagatacacgctaccacactcgggtcattctttgtatttttagtagagatggggttttgccatgtggcccaggctagtcttgaactgctgacctcaagtgatccacccatctcagcctcccaaagtgctgggattataggtgtgagccacccacacccagcccaatttttaaattgttaaaaatggatacaatacttaagaaataatttggcaatgtcatatgaatgtaaaagtacagtaacatagaacatgagataagactagatttatagacccttaggcctgaaatgcactttacaggtcatctcatctaactctctcttaaaagtaaggaaactgagcaccagtaagattaagttattaactcaaagtctcagagaaaattgacagttgcagatatcctgattcaatccaatataatttccactttcattctgcttctatcttcagtgtctctatgaaatgattaaaaaatttattaattagattttaaaaatccattttaaattaaaaactgcagatatccactagaggatgataatttgtagctgaaattagaagcaaatctagtaaatttagaaggaatattcagtgcagttgcaaaaaatagatgtgagtaaatgactaggatatttaagtagaaaagtttgttttaaaacaaacatttttatggaatgctttattttgggatcttacatccagttttggttttctagcttaatgaaagactgaaataatccaggggtgtaaaatgggaaaacagctggttgagttctacatttgttgaaaacattgatttgaagtaatagtttgtctttaaattcagccgggtgtggtggctcatgcctgcaatcctgacactttgggaggccaaggcaggtgattcacttgagctcaggagttcgagatcagcctggccaacatggtgaaaccccatctctactaaaaatacacaaaattagtgaggcatggtggctcgcacctgtaatccccccagctactctggaggctaaggcaggagaattgcttgaacctgggaggcagaggttgcagtgagccgagatcacgactgggcaacagagcgagactccatctcaaaaaaacaaagcaacagagcaagactccatctcaaaaaacaaaaaccaaaacaaaaaaaaagaaaaagaaaaaagaaattctgtgaaatcagaaagagtctcagagaaaacgccgtttatgatttttaactttgtatcatacattagaaccgtggatctcaaattttatcactaatcagaatcacttggaggacttgttaaactgcagattgctgggctccaacccccaaggcttcagattcaggcctctggggcaggactcgagaatttgcatttctaacaagttcccagttgatggtgatggtgctgttagtccagcccaaccacactttgagaatgactagattagagaaagcaaattatagtacaaagcaatcatattctggtgaggggattatacattaaaagctggtttctttcatatttgttatgtaaaaaatctgtattgatgaatgttttcatacttaacagaaaaactgtaacgaggacacccagacattatgttatgaagacttctgagtcattatgatgagatttcattatattaaatgtggtttaaattatatagttaaatgtacttttttagtaatagagttactattagaagtggaagtattatggcaagtctgaaaatatgggatctatgtgtggagtatattaagggaactctatagtcgctccccatccttgtcaacacttgctacaggcagtcttcttacttttagccattctaatagatatgcaatggtatcttatagtggttttaatttgatttttctaatgatcattaaaattgagtaccttttaatgtgcttatttggcatttacctctttggtgaagtatcttcaaatcttgtgttgccatttgttattggaccagttttttaatcattgcattttgagggttctttgtatactcggaataaaaattctttatcagatatatgatttgtgagtatttccttccagcctctttgtttttaacggattcctttttttttttttttttttttaagagtcggggtcttgctctgttgctcaggctggagtacagtggcatgatcatagctcactgcagcctctacctcctggcctccagtgatcttcctgtctcagcttcctgagtagttgggactataggcgtatgccaccatacccagctaatgaaaaataaattttgttttgttttgtttttgagatggaatctcactctgtcactcaggctggagtgcagtggctcaatattggcttattgcaaagttcacctcccaggctcaagcaaccctcccacctcagcctcctgagtagctgggaccacagatgccacaaatgccaacctccatgtctggctaattttttgtatttatggtagagatggggtttcactatgttgtccaggctggtctcaaacttctgagctcaagtgatccacctgccttggtctcccaaagtgccaggattacagttgtaacctgctgtgcctggcctaaaaaagattttttgggggacaagctctctctatattgcccaggttggtctcaaactcctggccttaggtgatcctcccacctcaacttctcaagtagctggaattacaagctcgagcctctgtgcttggctcaaacagattcttttgaagaacagaagtttttaatttctgtgacatccagtttaccaattttttctcttgtggattgtgctttgctcttgtatctaagaaatctttatctaacccaagttcccaaagattttcttctgtatttttctagaaattttgtagttttaggttttgtatttaagtctgtgattctttctgactgaagttttgtatatggaataaggtacgaggtatagatcaaagttcagtattttccttcttttttttttctttgcatgtggatagccaattgtcctagcaccatttgttgctgaagactgttttttctcagctgaattgcctttgcacttttgtctgtttagttgtccatgtaggtatatatccatttctggacacaattcaatgctgttgatctctttttccatcttcatgccaatagcacactatcttgattactgatgctttatgataaatcttgaaataagctagtgttagtcctccattgttgtctttttcaaggttgttttggctattctaggtcctttgcatttccatgtgaattttagacttggcttgtcaatttctacagagaagtcggccaaggttttgattgatattgcatgccttgcagcctggaggctctctcaggatactaaggtgggcatttatatggcttaccttgtatgcttctagtcactcttgttctttcctccttgcatgatgatgtccagtatcttataaaccttttttaaaacattttttaatttttatttttttggttgtttgagacagcagacaaatctagcccctgttaatggccagtggaagtattatggcaggtttttgataaacaggagagtaacaccagacttgtacttgagaaagagaattggcaacatcatggaagaactattagagggaaaagaaaagagattggaaaaggaaatgacgaaggaaacaaatcaataatctgaggaagaaacaaagattgaaattaaggcagctatagttggaaaggaaatactagctgactttagcaggcagaatagatagacatttgtgactagttagatgtggacagtaagagtgaggagtctaagatgactttatgttttaggtcttgcatatagtttggttctgtttggttgcagagactaggtgcctgcatgtgggatgtgattgattagaacctcccattttataaatagtactgtggtgttataattgataccctggagttcagaaccagttactcagtgaatattaatagttctttatttcttagtttgcagttcattataattgtcatccaaacacagatacactagtgggtgcttattcccattatagaagtagtttacttcactcaacaaagagtttttttgaggcttctggtaggtttaggtgtttatgaattattactatttttcaataggaagcttttaaagatggaaaaacaatcttggaagtcactgatgatttcagtcaattaaattgaaaataaaacatctttaaaatgtcaatataagtaaggaaaaaataaaaattaccttctaaaatgtgagacatcttttcagaaacttgcagtgtgtggaggtgtaaatataaggagaaatgcaaattgaatgggataagtataatgatatttgtagttaattatgataacttattttttggtggtgtcagtgatttaaattttaaaggattgatttgctattattttcatgaaatcaaaattttttttttactttccaacaataatcatagaaattattctccgacagataggaatatgaaatgaagttgttccctccttttgtgatcgtgacacttctactctttcctgaaagaaatgtttctccccacaaactacttcttatttagatggacatttgagagttaggtaaataacagagattacagcctgtcatcatggatcttataatctaatcaacttcttgtcagatatcttggaatcttaatgcttatagggctgatttgtttaattaaactgttccttcattaactttctgttttaaaggaggctgaccctattcgtatctttttcttggtataaatgtgtttaaaataagtgtagagatatgctaatctaaggcagttgctatccacatgcaagctaaaggtaattaaccttttttgagtggctatctcatttatgaacttacttgatatttttgttcttgatccccctaattctctcctgctcctttttttactggtgtggtttctctggcacagtaggcatgttttctgatctaacatgcataaatcttaagagcgaatttgacaaagtcttatgacatagaaatgtttatgcccaaagggtggtgattattgaggtagttaggcgaatggactctgttatttaataggtcctgatttaagtcctgcttctgcagcttattactatatgactttagttcaaggtacttaacctctctgagcctgtattttctttcataagatggtaataatgataatgtcttcttcacagagctgttgtagtaaggattaaatgagatgatgcatgtaaattgcttagcataatgtctggcacatagtatgtgctcaatagatgtttgctgtttatttaacttcctgatagaaaaccaagaaaatttatgtcaaatttatgtgtcacagaaaatcagggagactagctgatgaattagataagattgaaattcagaaagactttctttttacctcctgaatgaaataaaatgtcaggtttcaaattcatgaaatctgatagtcttaagttttgcattttagattgtaaaagtcagcagtactaatataggaagggagagatctggcttaatagtactttttgttgagttttttctttttaaatttattttctcttttagagacctggtcaatctctgtcactcaggatggagtgcagtggtatgatcatagctgactgcagccttgaattcctggtttcaagtgatcctcccacctcggtctcctgagtagctgggactttacaggtgcatgctactgtgcctggctgatttttttatttttagtagaggtggggtcatgctttgttgcccaggctggtctcgaacttctggcctcaagtgatcctcctgccttggcttctcaaagtgctgggattacagatgtgagccactgtgcctggctggtttttttgttgtttttttaattgacaagaccagcgtgtgatcaggtagtacaaatgtaatagtagtattatcatagtcttcgttgtttaacttatggctgtaattattgctttttattctgaagttcatctttaaagtgacaaatgaagcatgtttaagtaaggcaggtcaactcggtcaaaggaatttgatgattgttatttatcctgggaagcaaagattcgcagggtaggagatatttagtggctaccttcagatctttgaagcactggaatctggaagagacttgagactttctgtttgacccaggaggtagcttttctgtagctctggagtagaggaccagaatttacagcctgcttctgatattgaggtggaagtagttaacctctctgagcctcaatttcctcaaccatatgaagcagaaagtaaaattactctatgcagaagttatgtggtgtaaataagttaatgtgtgtgaatgagcaatttggatttattgttgtcattgcctggcagtgttctagggaggcgctgaatcagctctgtctttggaaggactctaataaatggaactgttcagcggtggaacaagctttgccatcacactaagagccaaacaaattccagatagttatatcagggctttttaggaaattttacatggagtagaagtttgtaaaagctctttgagagaagatacagtgtttgccttattcaccactgtgtccagggtaccctgtacagtgctaggcacatggtctgctcagtaaatatttgttgaatgagtgaatggaagttcctccactaacactcatattctaatctttgtttagcatcactctttttttgtttttaatatagtatgtgttgtcttctgtattagtctgttctcacactgctaataaagacataccggagactggtaatttataaaggaaagaggtttaattgactcacagttccacatggctggggaggcctcacaatcatggcagaaggcaaaggagtagcagagtcatgtcttgcatggtgtcaggtaagagaacctgtgcagggcaactctcctttataaaatcatcagatctcatgagatttattcactatcacaagaacagcacaggaaagacctgcccccaggattcaattacctcccactgggtctttcacatgataatgggaattgtgggagctaaaattcaagatgagatttgggtgaggacacagccaaactatatcatcttcccacatatatttgtttgcccttatgttgtcattttatagtggaaattttgtcattaaactgaaccagacattcacttttccttctgttcacctacacttactgaaaagtagagcacagagatacaattttcatcgtgaaacttcctgggagtagtttctcctcaggtgtagatgtttttaatttatttctgctgtttctataagtatttgaatttctgtagtcctttttaaaagggatgccttacacatggaatatttgcatgggattactgtcccaagaacctcacagcaatggttgcctctaaggagagcatttgggaattggagataccacatgattgtactgttagaatttttcaaccgtatgcttgattacttttttagtcatatgctttattaattttaaaaacattttttaagtagttggggaaaccccatgattcagtagatactagcttaagtgaagaagaagatttgtattgggaatattgcaaagtacagttaatacagcaaaatacccccatttgttaagagtctcctgtgttggaggccttatgttgagtgctttacctacattctcatttaattttttcaataatcatataaaggccaggcacagtggctcacgcctgtaatcccagcactttgggaggccaaggcgggagaattacttgaggtcaggagtttgagaccagcctggccaacatggtgaaaccccatctctactgaaaatacaaaaattagctgggcgtggtagtgggtgcctgtaatcccagctactcaggaggctgaggttcaatcgcatgaagaggttgcagtgagccgagatcatgccactgcactccagcctgggtgatggagtgagactccatctcaaaaaaaaaaacatatgagatttaagcctcactttcttttgtcttggctgccacaaattcatgcaagagctttggtatttggtcaaagccagactctgtttcttaagcctcttgggtttccaagtcatgcaactgtaggtaagacttgagcacagccaaagacttgaagaccagagagaagtggcagttgttgaaaatatgttgcctgggaaatgctcttgtggccttaaattcacagtttcttttcagtctaccagagattagatagaattggacaagaaagatgtggaaaaaagataagtcaaatgaaagacacctggccgtgaagatttggaggctttaggtagccaaagggggtctgcggatatgctttaaaatgacagattcccatagcctgagtttccatagtgtttttgatggctggcaaagattgatttctatgatttttattaattgaattcatatactttatttcaaacagtattttgaattataccactatcacagtcatttatagatattaacatacattctaaggatatatctgtctatataatcaaagatgtcgtggtctccatcactctgaggtagagcaatttatttaagtcaatcagtctctctttcattttctctcctaaaagaaggtaatgtttaggagaattcctttagtacagaacagattattcattactccctgacttttgcatgaagggtatattattgatttctgtgtaatagtccagacactggcatgtgccttccatgctgactttgtcagtcttgaggtcagtcataactccatcatttattaactatgtcatctggggcaaatgatttagtgtctgtgagcatctgtttccttatctctacaatatgtttaataacactgaattcatgttgttgtaacaaagaactggataaggtaataggtgcagggtgcctggcacagactcagtgctccgtgaagatttgttctgttttaaaaatctatgtccttctcctctcttcattcccaagtgtttttgtttgaccattttaactctaatgtagtctctgtggagaggagtgaggcatttgtttagcctctaccccagtccggtgaacatctgatgaacacttactcatccttcaagacacagttcaagtttgccctcaccagctaaacctgttctttctataggcagtgttagctgcccgttcttcttgctttgaaacatttttcccctctgcctaacatgtggtgagtgctcaataagcatttgccgggcaaatgagtttctgaacttgggggaggggtatggtgtttacagtgcttcttatggagcattattgcagtcttgtgagttcagtttcacgctttagaagttagtaaaaaacaacctagagagctaagagagctaggaagatgattttcacttgctaccttttggttccaaaggcaaagtgctttcagtatttagactaattacacttgcagaatagttatctattctgtaataatgataatgacaaatattttgttagtgcttactgtgagccaggccctgtgcagatcattttacctacattatctcatttagtcctcatatcagctttctgaagtagttactgttattgtacccattatatataaaaggaaattgagactctagtaaaatgacttaccaaaaactacatagctagcatgtaatttcataaagcctagatttgaatgaagtctaattccagagctagcttttttgattactgtattacatcatctctcttctgtgtcacgatgatgagggaattgtgttggcgggtaaactaaacatgactataaaggtgactacttcttgaggatttctcccatattcactgtgtttgtaaagaacccctgacacttactagcttgtatcatgtactgctgacactcttcactatgatttctagtgggcggcagttataaaatgtgtattcagttttttttttttgagatggagttttgcccttgttgcccatgctggaggacagtggtgctatcttggctcaccacaacctccacctcccaggttcaagagattctcctgccccaggctcccgagtagctggaattacaggcatgcaccaccatgcctggctaattttgtatttttagtagagacggtttctccatgttggtcaggctggtctcgaactcctgacctcaggtgatccacccgcctcagcctcccaaagtgctgggattacaggcatgggccaccacacccagccatgtattcagttttaattttgccacactaatatctatgtggaggaataattacaagttcaaagtgcagtgtagggagaagtaaccaagtttctattaaatattgctcaaggagtgagtaagtcattaaattcaactcctgataaatatgtgattacttaacattaggctcccaggacacccccagtgtgggtgcacgcacacacacacacacacacacacagaggtaggtgcatgtatagatgtgtgttgctagagatagttggagctatagtttcagagaagaagggttttttttgttttgtgtgttgcattttggtgggtggggtcagaggtatgcttgatactgtgatttgttttattttatccaaaaagaatagatgtcttctttacaaaatatagaaaaatcaagttttaatttgaagagattaggaaatacccatattctgtttcagaaagtaaaatctcccaatatacgtcccatttattctaagaaatttaaaatacaatcaggcaatcccttgccgccttttcttccttcctccttgccaaaatggacatatgtactttatgacatttaatatttatcagagtcttctgagtatatgagtcatgttgaattggagtcagcaaccccttaagaacactaaatgtctactttgtcttagcctggtattttactaataaaatgcgtggagttgaatttaatccactatatataattggtggtgttcctgttcagacatgcctgtacatggctttgtagaataaaaaacatctgattctgcgatttttatttgtttaggaccaaatttcaggaaacagcttggccgtgggcaaaactatacagttgaatcagagacataaagttggaaggaataagtaggtgaaatttgtcttgagggtgtgcctccctaacacacacatacacacacagacacacatccacgtgtcccagttgtaaaggtaaagaagttttgtagacccataaggtatgaagtgtttggttcttttctggagattagggaggattctggaaaaggaccttgtggctgagatcataggaaacagagagcaaagcaaaatgatatctggtagtgtaatgaagtagtatagagataaatgtgtgtggacgtgatagggaaaagagggggggaaagtccttattttcatgtctgattcattaaaggcagttctactgaagacctggggttgttgagggatcttatttggctctgggtaccatgtactaccggacctgtttcatctctgcttcccaagcctcaggcctgggcctcagggattctctccagtgcatgccttaggctacagctatagggcagctgtggttagggaaggtccctatttagaatagttggtcaaaaagcacatcacttctgtccctttcttgcagaactggttgctgctctggaatgaaagtttgattggtctgttagccatgcccacctggatttgggaaagccaatagaaagaatcttctgctctcctatctgctgttgctttttaacctgtagcctagaaaatggcattatactgaacaaatacggtatgaacagaccttagacaatgctggaactggcgccggataagctcatgagtccatgctgtgctacataaggaccgtattgctacaggcttactgcctacatctcttagtcacaaaggacctggaattggtcttgcttgagagtctacatctataaaaatagctagtttgttccctcccttcctttcctttcttagacgatcctttctccttcattttgcccctagcctttcacatttgagacaaccagccttgctttcattctttcatacttgtttgtgcctcattcatcatcttctattcattgaagtctcatgaattttaagttgaatttgattataacacaaaatcacccatttctgtttaatgttctgttgatcatataactttaatgcctattcaatacctcaaaaagagagaatagtaatgtagttataatattgctgttagtgggttttgacactgagtaacagatgacatgtctaatgaatagtgtgactgcttagattgcataattataggtttgtttgactttaggaaaatcatacgcaggccaacttcacccatttagagactttttgtattatgtaaatattagagcacttcactctaaaaagaaaccccctccttcagtgataatcattctttgtttttccagggtttgccactcagtaggaaaaagcaaaatgaaatagaaaccatctttaaaggatggatttaattcagtagcccttcctggtttgaataacacttcagtccacaatggtttggcattgtgcttgtgactggggtcattgggtacagacatgcaggtttataggatgacagccctggcactggcatacttacagaaacagctagaattttataatgtaaatcagggattatctgtgccctttggacttgattttgtggggtggcagtgcgggggggatagctagttattgtactaacttcttgcaacagtttcttaattgacgtatcaggtgacaggtctcacagagtcaccaaggccccactgtgatacttctccatgtatttattggcttgtaaatgaatgttcaaatatatcacttaggttcatttgattaacgaaagcaagggctggctgtaataaataaacgctcacagaatggcttagtgaaggaatttgaatattcctagcctcccagacttcgcttggcagggctgggggtcgggggagtcaaatgtgtggctaataaaagtgacttttgactttgagctctattcagaagtaattctgcaacatgaagccttccagtattctcccttcaccttgaacatttctctcctgctgctcttcatttgctgcctggtagtcagtctggagctgctttcatctctgttgctgccggtgctcttggcctagtacaagcttgacctcttagcagctggagttgacttagttattctcctagcattctctgagtgacttggttgctcttacagcacttcagattagctttgctgatgtgaaaggtcacttttcaccaatattaaaacttattaatcttcaaaaaggggaaaaataattttctttttgttatcagatttcttaaggaatttggaaagagctttccagaaccatgtctgatagcctctgagtggcattgtctagtgtcctccttggaagtgttgttttatgctaacagattgccaacggagctgagctgaggctctgggtctttgactttctcctacctgaaggtttgttccctggatattcatggaggagtcggaggtgcttgtcctccttgtgtttaaatacctttttgcacaggtgggcaagtgtacagacttggcagttagaaagccagagtgggaggcctggcgctgctgctaactacctttgtggccttgagcaagttacttcagttttctcatatgtaaaatggaaatagaactacctaactctttatagcagcatgatttataatcctttgggtataacatgcacacatatgtttattgcggcactattcacagtagcaaagacttggaaccaacccaaatgtccaacaatgatagactggattaagaaaatgtggcacatatacaccatggaatactatgcagccataaaaaatgatgagttcatgtcctttgtagggacatggatgaagctggaaaccatcattctcagcaaactatcgcaaggacagaaaaccaaacaccgcatgttctcactcataggtgggaattgaacaatgagaacacatggtcacaggaaggggaacgtcacacactggggcctgttgtgaggtggggagagtggggaaggatagccttaggagatatacctaatgttaaatgacgagttaatgggtgcagcacaccaacatggcacatgtatacatatgtaacagacctgcatgttgtgcacatgtaccctaaaacttaaagtataaaaaaaacaaaacaaaaaaaaacaaactacctaactcttatgttgccctgagatttgatgtaagtttgatgtgctggcacataacagtgttccctaattgttagctacagctattatatatacatatataatcattgtcattactttccatgttttatcatctgcactgaacttccctaatgccagacttgcagaagtgttgtacagcaatgcttttctctctggagtcatcattctgtgaatttgaacatcgttgtgtgatttctacccaccactccagtgctggtgccatctcttttcctatagaaaagtcacactgaaaatataaaataggcaagtgaagttatatcatatgtcctcttttatgttctaattcagttgaatctctttgataggacaatttatattttagtgaaagtttaattttcagatttatgaaatataatggccttagaagaatattgaaggaagagttgctataattctttgttggatcctaagaacactaaggcatcattcttgtcctcaaatggattaaaatctctttggtgaaaggaaacaaatgcagataagaaaggaaagattggtggtggtcccaagatatcaagagtgtatgtgttaaggcaaattaggtgaagaaggaaatccttctaggctggtataatttaaaagcaggtagggcctgagctcagcccttgatggatatgtaggatttaatttggtatatattctcaaaaagggctttcagtgaaagagtgggagaattttgatggtgggaagatatactgtggaatcaagtagcagggagcctctgcctgatcagtacctccacaaccaccccaacccccagcaactttttagtcagtaactctgtgtttctgtgtttatccctttttccccctccaaagtcaagaggtttttactgcagtcgggaaataaaggttaacaagaagaacaaaaaagaattacgaaaatcctcttaaaattgctgtggcaggttgctacttgacatggacgttctcatgacctgtctttaagatgctcttgtgggagtcccttctagttctcatcgtaggtctctggtctctcagccccctgctacagctgaccaagaccctctgactacagttatctgacggcactgcttccaggtgtgctgtgatcctcagttctttttagaattaccttcctgatctcttctggtgtttcctgttccctttgttgcttgggctgcaccagtctttcctagtgttcttcagcagcttgtcccaacattcttgggccctggagcctgaactgaggctgcctgtaagccagttaggctccagagattctttccttaagcttcatgccatcaaaactgacccaagccttgcccatttcctcctttgcaggaaggtctctttggccttgaaccagcttactatctggctcaggtcttagtagcatatatgggaccctgttaatgagaacttatcatctcatttatttcgttttgcagctcttttgtagcattttgaatatcttaggcacattctgaatgctttcagaaattaactcatttaatcccagagggagattgctaacattatatctatttccactgatttaagccccttacagactttcatttcttatgcttcagacttttgctcccaacagatactttagtgagtgcctgtttggttttggggtacctctaatcagcagaattttggaaaagcagtttatactgttagtctttgttcaggttaccagccttacccacttttttgaccagttccagtatcagaatctaatactcataaaatatactgatccattaaggaaaacaaaacaaaacaatactttcctttaactaggtaaggctggtgtgaaaccaatagtctatttttcattattttaaatggaaaaaaataaattacaggttaactaaaacccctaatcaatttactgaaatgtaactaagtacagtaaaatgcctaaataaattacaaaacatccattacattaggatgtaagttgtttaaaattcacttctttatcatgaaacaatatgatttttaacaaatggttgctgtatatatagcaacatatatatgttggtaccaagccatatgtccattttgttgactttcagaaattttcacaacaacaaactgtgactctaatagtctaacaattttacctggagtatgacctgagccttttctcacgcaccattttgttaaacatatatttaatttggggaatgtaaatacaaatttttcttatgtaaacattacaccctcccctgaccccctaacttacattgagatatttgtgtattctgtgctgcctggatagtaaaagctgaagggtcttctaccagaagcatgttaacccaggagatagtctatgaaatatacttataagtaactattataaaattaaagcatatgttttaaaagccaaatgtgaatggactttacattatttcattactttggaatcatctgtggtattattcttcagagtagaaaagaaaaactgacatttgtctgcactaagatatatgaatggagagtctttgagtaggttcattcccaaatgtgatgaaagaaagctttattttcttttcatttagttatcttaaattcaaagtttttagttgaaatttttatgttcctgtgttaactatcttttcctaatctattaaattatgttagagcttgaagaaacagtttaaaagcacttgtaacaacattaccttgcttttctaatttgctagtccctttttatagactcctgttccctgaggatattttaattttttaaacatagtaaacatagttgtttcttattctgactaatataaatagttacaataactgaaatatttgtggatctgtttctgctgattgttattcttagtggcttgttttcttgtgtattataggtatgtaaggtttttttgtttgtttttatatttatttttgtttcagccttttctcctgtgatctgctcattcttaaaaagtatttgtagggattatttgacacttagattaagagtgccttctccagaaagtagttatatttgcttctgccagacacctgtgagtactatctgcctgagaccacctcccaccaagatcagagactagggtctctggatcactcaggttaggggaacccaggctgctgcaaatccaggaggactgccttatggccagtttttctgaaaacaagtttgttttctcttcccttttccctgttctgcttcatggccaaggctaacctcccttcggtcccaggcagcagggagagattacttttggttcatctttatacaaagagttgggatctcagcttactgtgggatagtatgtaactttggcattctgttgccccacttctcgtttttgttttattctagattttgccctggttatttcttattaccttgtgactcttgtttttaagatttattttttttctactgtatctgatatctttggttttcttttttctttttttcttttctttctttctttttttttttttttttttttttgagatggagtctcactctgttgcccaggctggagtgcaatagcatgatctcagctcactgcaaccttcatgtcctgggttcaagcaatttccagctaatttctgtattttaatagagactaggtttcaccatgttggccaggctggtcttgaactcctgacctcaagtgatctgcctgcctcggcctcccaaagtactaggattacagacgttagtcaccacgcccggctgctatctttgattgttttcattaggaagattggtccaaataatctagctctgtgttattaaaagtgagaatcttccctatttgacctttaacaatccttcacagtttatgcaacagatataagacagagctgcttaatggatgagggaactgaggctgggagaggtgtagtgattgatttaagatcatgtaagtaagggcacagcctggaactccttaatacaagtcttttcttctttccaacctaccactgcctttgagctgtcttctactgagtgtattcttagaattttgaatgaagcatcatatggtgaggaggttttttttattttttttattttttatttttttgaggaggtttttttaaaaagatgtaatagctctacaaaattatttagaccattgactgatgtagattgtattgatgcaactttttccagatatggcattttaaatggaaaataataattgcaatttttttttctttcagctgaagtgagtagtgaatatagtatggacaaggcaatggttgaatttgctacattggatcggcaactaaaccattatgtaaaggctgttcaatctacaataaatcatgtaagtttataccactccctggttatatatttggttacaactcactgaccgagaagtagaaacacaaaatcaaaattcttctctaatctttaatgtttccttatccttaatgtagcagctattaaattcctctaaatttggaagtctcataaaattggaatcctaagtattttcctggctaggccacttaggttgattaacatattaaatctattttagattgcttgcaattttttgtctcaaaattttagtgtaagcctcctttgaatgtgaggagatttttataaaatcctaaaaattgcatgcaccttgtttttattgttctatttgcttaaacatacaattgagaccaggtttagttactcattctctaactttaatatgcatctattgccaaattcttagaatcagataatatggaagagttttaagcaagtttaaaaataaagaagatcggtattttggtttttccagaagccaaacttatctttgttgactccagctgtcacaggaacaacacataaggcagttaaggtgggaacatagcaacatccttttcagtagtactgtgttgagtaagaaatgagcaatacgattgcagtcatgtttctgagaagtcttttgtcctctgagcagtggaaactccctgttgaactgattttgtatacctgtgtaataggatgtcttgtatttctggtttcgttatttgccttttcttacttacagctatgggaaaattccaaaaatcaaatattttacaagatcagtgattactcagtagaagatacatttttaaatcatgtttaatacctaagccaatgaaatgagcattatatagttagagtaagctttttttaatggttagtatttaactatagtatttgactaactttaagaatatcacctatatccaaataataaactcattcagcttgtaaaattttgacgtttctggctattgtgactgttagtcctggtcttatgaatatttcttccataggaaaatatgacagtgccgttatgttgacatcatatttgaaactggatggcacttagactagaggctttcaatttcagccgaaccctagaaccagccagtttctgaactctcagagattctgatttcattagtctggagcaggactgggacactagtattttttagaaactcattctaatgtgcattcaagggtgaaaaccactgacttaaaagaacaaggctgactttatagaagaaagtcaagtgtttactgccaaagattagagttaggcttgttacatggatcaatcttgctttgacccttacattatgtggcacttacttgataagcctttctatctttaactttcatactgtgcaaatgcaatagcacagtgtatattacagataagaaaacaagattttggagtcaaagaacgttatgttgattttttttccctattaaactctaggatttgcagatacttaaggtatttttacatcaagaattgaactcttggctgggcgcggtagctcacgcctgtaatctcagcactttgggaggccgaggcaggcggatcacctgaggtcaggagtttgagaccagcctggccaacatagtgaaaccctgtctctactaaaatacaaaaattagccaggtgtagtggcatgcacctgtaatcccagatactcaggaggctgaggcaggagaaccgcttggacccaggaggtggaggttgcagtgagctgagatcacgccagtgcactccagcctgggcgacagagcgagactccgtctcaaaaaaaaaaaaaaaaaaaaaaaaaagaattgaacttttcccccttcaggacattgagtcactcatttaaaaaaaagtttaaaacttctcactctttctcacattcagtagttaacaacatttctttcatcttgaggtttcatctcattatcctcgaacagggaagatagattttatctcacttttcagccctaacctcacactagaatagactggaacaacttggatttagtgattccgatgcttatcaggaaggtctctgttcttttataggaagaaaaaacatagttatttttcttttatgatacaaaggtatgctttctatgcaagctggataccagaccaagaataataaatcacaatttcataaggtttctaagacttgatattatatggggatatgaccattttgagggaaatgttttacatcactttatgtacttgaagctaaggatactgctatcttattgcttgttttagtgagcgataagaatgaacagcagcttgggaggggccgggataatatacttgtttagaaatagcaatggtctagggatctgaagcttttccagccctggttcttctactttctaagttatgatccctggtcaagaaacctaacctcttgaaaactcatgttttttgtctgtgaaattcctgccctgtgtatttcacagaatgattatgtgaatcagattagataatgtatatcaaaatgctttggcattcatcaaatttgatggggctgtaagataatatattattgcaaactcagatttccaaacagaaccccttagagagatggaacaaaatcttctaaaaagcaagtattttgttttgctcactttatttcagggtatttttttggctttgacctgtcctattctggaattcaagagtcatataggattaagtataggctacttaaattattgcacaaggtgttcatggcctctgaaatgaatgagttgtttaaaataagattatttttttaaaaggcaattaatgggaagccatacaagtcccatttaacccactgctctgtcatagacttttgcaaattgcgatacttccgttactataatatttgcctagattcaaatctaccctgtggtctttctgtttatgaattttcacatagtcatagaaagttgatttaaaaacttttttaatcattaaagagcatttgaatttattatttaaatagacatctctcttccactctcatcttctcagaattctaaagattatgctccttttgaaaagttttggaagttttctttggaacctcagaggtatgggtcaacttaccaacaatccctgggaagtccctttggcaattagcagaagttctcaggttaccttccgttgtctctcaagaaaacagggctactatactccacagtgcccaaagattttgtttggaattggcatctattttagtgctctgaaagttaaaaaaaaaaaaaaaaagggactcattccagctaatttgttgagagaatattatgcagtgaacactaaaaaaattctcagatagtctctaagtcatttataaaaactttcaggttaaatgggttttatacctgtcacaactctttaaaaactgcatttagatcctcagagagttctatatgaacttttttgatattttcagtcataagaccaacatgtcataaaagtgtttttagagctataagacagtacacagatacacacttttttttaatcactattactgccacggaaaaactgttttctcagtttcatattgagaacagaatgatgttctgaacactagacttctgatgacctgatgtttcctcccttgctttctacgcttttattaagtacattgaagagacactattggctggctttttgtttttcagttttcataaataaatgaataaatttatgaacatttgaataaatactcaaataaatctttgaataaatatttactgaacagccatgtgccaggcacttctagttgcaagaaataggaagtcaatcagcaaagtccatgtgaccttcacctcaggatatgcgaagtccagaacagaagacaaatattttacaaatgttatttaattactgctgtggtgtgtgctacaaattaaaaataaagcattcagggagagttaataacccaggggcaataatgtcttcagggcagggaagaatttggagactccttctggaggaaatgatatttaagattcaagtcaaatgagtctcaacatgggaaatatatattctgtgtaacttttgcatgaaatggaagcatcttatttctgattgtcttgatgtcagcttcagagtgccttaatcaatccaaagacttattgtgaaaattaggccagagaaggcctacctttatatatagaaagttaatgtttatagaatagttgagtaacctaagattggtcagtgattcatttagtaatagatttttgagtgcctactatgtgccaggaactatgcttagtaatgcaagtcatggcagtagttgatttaagaattattttattatcaatatcctacttcttaaacaggggttatctctcttaaaatgagactttttattgactattaaataaacccagtggtagtactgtgtgtttctgattatatgtttatgattgttttaaactaaacctatagttccaaactgtgggcttcaaattgctcagggtaggtttggagagtgaacaccagtttagttcagggaatcctcacgtccatttttaggtatgtgctttttcagataagaggtaacaaatccaaccactatcatgggggtagtccttgcaatgtttttctaaccttaattctcacagggaaaatgatgggaatgtagctaaatgagaatgacccaacaagttcagagattactgtcatatatatttagcaattgatgataaaatatatatcctctcagctaggtgtggtggcgcacgcctgtagttccagctacttgggaggctgaagtgggaggatcacttgagcccaggagttcaagatcagcctggacaacatagtaagactccatctctttaaaaaaaaaaatgtttttggtgaccagtatagtctcagagtttagcaaaagtaactaaagcttgagagtcacattatacttcagcttttattgtttttattatgatccttagttgtgtagttttaagacattttacctgttaaaagaattttcaaaaagatttaaaaaaaagaattttcagacttgacctgtatattgttcttttggtatgtgctgcttctggatgttaatttattgaaaaatccaagtatgtcttcactttcctctaataccctcttttatgctcttgcatcttataaattgtataagattttaaagcatttatattggattacagctacatatttgtttttttaagtcaatatcttataacaattcctactagaagcctggtgagggagaatatttttcttcttaactggagcaagtaggtgctaggttggtccatttgtattgttttttataaattcgttcatggatatgccctatgtagtgtggtttttcacttgatatgctaacctgaacattttatatgccttttaaaactaatgtgttgagagttagaagagaagaaatgtacttgatgtatgctattgaaaccaaagcaatcttagatataataaaggaacaatgtgggtcaaaggtatagtttatctcagctctctcattatgcaactagttttgactgtttttgacatagcacttccctgtgcctccttgctgttcacccttcatcacctggtaagttgtgcctttttcttactgtgcagttaccttaatatccactactttaacatgaaattctatagggtatcttgcaggttggaagttaccattttagttaaaccaaatttgggaagaatttctcccttagaaagctaataatttattctatggtacctgagagcagttctaggccacaggatgtaacctattatatatgaccacttactgactgaatataagaatataccccactctattaggcattgtgaatcattgacaaaagaagaaggagggggaaattcgttcggtggctataaaatttgaggacaggagattcctgagcatgagataaattactcttgtcagcagaatagcaaaaaggcaggaggtgacaggagagtgaaattagtgaaaagctcttcgagccagaggggaaagtactaggagactcacctcttctctactcgctgcatatggcattctacagtgatagacaactcttaacatgtttcttatcaaaagttttcaaatgagttatatgtgagcttttcatctgtaggaacattgctcaggtgtggaaattaaccagagaaagaaagttgactttaggtattcactcttcagacacttggaatgtgtctatttctgtgattactggtaattaacttctatttcggtggtttagaactccctgtacagttattctcaaattaaggttgtgttcggtaacattttgcctaataaacagagacagagacaattagttctgaatatagtatcccactaattgaattacctctataagaaataatctagatataaaatttcttaggtttcgaagtaacatagctgctaataggtgaagatatgttatattgagactgattttcaccgttacctcatagaaatccatcatagtattttggagttattaaatgttgggttttaatcagacttataaaactgttactgggccttaatgtgcctctagtgcagcattttcaagagtttgccccataatactaattaatcaggatgtgaataagtataataggaaaataggattttgtggtcaaataagtttggggaatgcttgattaaaagaatttccttaaagactccaaagcctttaatgtgcttttatgcaatgtgattctccaaaggaagaggatattcagaaatgttgtaaacttagttaactagaacatctctctggaggagggactgatattcttcagaacccactttgggaagtgctgctgtggtttcaaccccctaattttacgaaggaggctgtgagataggtccagcactttgtggcagagtttcttgtggcatccagaaaactgggaagtatgtcgaactcccttccaaaatgagccttaaagatgtttccatgttgaaggtcaggaaagggccaggccctttctccattgcattactccaacagtgaggaagggacagtttttaaaaacatgcggtgaatgcttagtctgtgtttgaagcaaagaagacccctctgtgcagtgatgatatgagaaaaaggagagaaggaaatgtttgagaggaaaagaagagaggggcttacagaagaggcaggagacacacaggagcagcagaatgggcaggaaacgcatatggacctttgaagggccaggctgaccacagcactccaggtaggtactgaggcgcccagtgtgattattaaacaccttggcctcagtggcaccaggccatcctagcagctaattctttgaattacccaaatgatatgaatgttccttaacacagcaaactcctgattatttctgacattgtagatagtccacatacagcattaaacctttattttagatgtcaatttaacttccttccaacctcacaattttcacgtaattaataagtattaaaaagcttgaggtttaggcctttccccactaattggcagtggtgctgaatgggctaactgcagaagagagatggggaaatagactgaactgggactggggaatggatcagtaaatgttaaaattcagtgtaaaatgaatgcatttttcagcgtggagttgaaagcacagtagtcactggttgtctacagtttcactttccactgtttcagttatctgtggccatctctggtccaaaattattaaacaggaaattacagaaataaacagttcaaataaataaatagcacctcattctgagttgtgtgatgaaaccttgtgccttgctgctctgtcctgtcttcatcacaagaggaagggtgagtacagtacaataagacattttgagagcaagaaagattatattcacataacttattacagtatactgttatcattattctatttttctatcagttattgttaatctcttgctgtgtgtaatttataaattaaacgttattgtaggtatgtatgtataggataaaacatagtcatacagtcatgaaccacataacaatatttcagttaacgaggggccatacatatgatggtggtgccataagattataatatcatacttttactgtaccttttctgtgtttacatatgtttagatacataaatagttgtcatgttacagttgcctacagtattcagtatagtaacatgctgtacaggtttgtagcctaggagtaataggcttactatagagcccaggagtgtagtaggctattccatctaggtttgtgtaagtacactccgtgatgttccacagcattgcctcatttctcagaaagtatccccatcgttaagcagtgcatgactatacagggtttggtactatctggggttttaggcatctactgggggttttggaatgtatctcctgtggataagggtggactgctggagttgcttattagtctcaaattgctcagttggtggatcacttgcggtcaggagttcgagaccagcctgcccaacatggtaaaaccccgtctctactaaaaatacaaaaatcggctgggtgtggtggcatatgcccgtagtcccagatacttgggaggctgaggcaggagaatcgcttgaacccaggaggcagaggttgcagtgagccatgatggcgccactgcactccagtctgggtgacagagtgagactctgtctcaaaaaaaaaaaaaaattgttcagttggtgccaatagtatgtttagtccaataaagaaacaaaagcctcttgacatatgtacacaaatagctacaaaaaaattttaacggtgaaatagtttgacagagacaataaaaacgtgcataggaaattcagagtaagggaaaagagtctttgcttaaattctggctttcatgcactctaactctgagcctcagtttcttctgaaagtagggatgataatttaggtcacagagtttcattaaggatgaaagtgatagcatgaaagcacctaaaacagttctgtcacactaatttataaggttgcctagaacgttctgtaaagaactcatttctctggaccaaattcaaatactgtctgaaagggaatttcaagttaaagtttggagagtagagtgggcagcaggaaaccatcgggaaaggctagagatgatgttccgagataggctgaaggaagggcctctttcctcggaaggggttgggggtggcttggggtatggaagttagtgctcatagtcagtgttgtgaccagaaaggattgttcagaatcaggggaactgggccaatgcagaggccagtgaacaatgtgacatttggccagctgcatttgaacttccctgatagtcaccctccctatgtctataacaatgaaaaagataccgcaccctttaatatgtgatcattaatagtgatgagggggtcattctagagataagaaccagacaacaagtaaacattcacagtttttaattcaggaataactttcagtgttttcttagacattttatttaaatgaagactgaggaaattcagccctaaaatgtatttctctctgtgtacgagtacacaatcatgctgtttattaaactatcttgcttacatctttaagtattttttatttactttattagtaacacttatttgaaaaagtaattgggagagaaaaatgtgttggatttatgcctctgatgtatcacatgcaggttgtcagctctggttcaagtgtgtaatctctatacattgctgacaagcgagagaacgagaaggatataaatggagagtatgtgaatggattttattttttcaagcccctgtgtgagtttgcaactgtgctggtaaggaaaagttctttcattgtgcagtggagccagtgcccagtgaactgtccttgggagaatggagaggatttctttccattgtttctctctcacagcatcaagtttctggtaatggtggcactttccttcttttgtgttgtggccagtgtgatatttaaaccactaaagctttaagaattttatttttttctggacttccttttttaaaaaaaaagtctaataatacagcactctttagtgaaaatcattatgtttatttatcttgggttagagtaatgcagtcagttatgaatagttttaaatttaatgatctcttttatcctttatttcatcttcaaattatcatttagtcatcttcttgtggaagctgatattcagaaagatcaagtcagtattacttaaaattggaaacagtaaaggctgggtgtggtggctcacacctgtaattccagcactttgggaggctgaggcggttggatcatctgaggccaggagttcgagaccagcctggccaacatggtgaaacgccacctctactaaaatataaaaattagccaggtgtggtggtacatgcctgtaatcccagctactcgggaggctgagacatgagaatcgcttgaacccaggagggttgcagtgagccaagattgcaccactgcactccagcttgggtgccagagtgagacaatgtctcaaaaaaaaaaaaaaaaatcggaaacggtaaccagaaatagtagaatatgattgcaccacaggattgatttccagacattctgacttgcttgctttttaccttacccttggctgatacctgcaaggtctcacatgcttctctgcctgccttccagttgcctcggctatttgtggttcttggagtgctgttggtaccacgaagcaagtcctctctacccatcaggtcactttctgtcaccctgaggtttattttagccccctatatggaacagaagcccacatgaaatactaaataggaactttaagtggaataaattctgggtgtgctcaaagagttcttctcttgcaaaatcagaaattgaatttgacacatgaagtatagttaggccatgttttgaaaagctgcagcaatacttctcaggaagttggtaaaaaaaattttaattgtttgaaaattaaaagcttcagcaaaaacatcatatgctcaattttctcttggaagaaattcttgttactgcttaaagcacctataaataatgtaggtgaaactgaacatgttatactacatgttttataatagtaatggaactgctctcagaatgtagaattaaaccgttttggctttataatgtaaagtgtcatatatggtcctgttacaatcgtaaattttccagtgttagagttaaatttaattaatgattttttttttctgtgcctgcccactgaatagctgtgtggccataagcaattttcataggctctatgctcgcttgcaaaatcagcttagtaataatatctgcccctcctatctagtgatttcttgattaaaaaaatgagataacattatgtgaaagtacttgggaggtaagagtgctatataagggcaaggtcttactgttctgtcctgttaactttttacttctttctcttaccacaaaaacacctaccacaggctgatttaaattggtgaactcctctaaaccacctaaacttggaataaatggcgataaactttccttatatttattttcccaactcacagcttaaactggaaggaaaaagtgtataagattcacatttaccttttgactttagtcatctttttcataaaggtttattcctgtctaccatcctgccccctcagaattttgcataaatctcatataacagttcaacaagtgactggtgtagactgggcctgctttgtcactgagtcactttattatgaaatacttaaagttgaatatctgtatatagcaatgaagaaagaatgttaaacagtttatactttctaaggccaggcttggtggctcacacttgtaatcccaacactttgggaggccgaggtgggaggatcgcttgagcccaggaggttgagaccagcctgggcaacacggaaaaaccctgactctacaaaaaaattaaaaaatgaaagtaaataaacaattcaaaaatttatactttctgatctgatggttttcatgactaactcatcagacagcaatgaaaagtgaaattaataaaaattcacaaagccagatataattagttaaaaataaagtctgaataagccgtaatcatctttacttccctcttcccattttgtaagcagttggtatttgattgataagcatgtccagctgggaaataaagatctggcttctaatccatgttctaccaggctgtgaccttggacaagtcacgtaacttctgtatttcagcttcctcatttctaaaatggggtaataatagtacttggcctacatacctcattgggcaattgtagataaaacgagattgtagataggaatgttttgactacccccttgccccacaaaattgaaaggtggttatatagttaccacatacagtcctcatctgacaacccatatctgaatggccacaagactgaagagtgaaagaaacttcctgattctaccaacaagaatgggaagggagtccctgttagctcttagaggaggaaagatacattcccagtgcttagatctctgaatcaaattctggaacacagtttcccacagaaatgacagtcagtggttgtgtttctggctagccaataaaaaaggaaaaaagaggtttaaccataaatagttcattgtgatccaatttctataaagctgttaacaaagcccacttgtagtatgaatattagcttggagtttgtttcaagtatgttggaggccttagcccaggtctggataagataatgaatccacctctcttctagcttccccacttatttaatatttgcacagggcttacttaagccagatttgtaagtatcatcagttcatactccagtctcctggccctttgactgaaattctgaaaccaacattctttccctcagtgaaagggtgagaagccctttcaggtccccaatccctttaataagcacagtgaccttacaaagttaggaaaggtggctattgttgactctgagcctcaagaaggttaagggacttgcgcagatcacttggttagtctcaagaggtgagacttgaacctcagtgttttgacatgtaattcaaggctgttttcatgacagttctgtttcaagatggatgctattcattgaattcactttgagttgtagttttcagttgagagtaagaatgtttttagggagtcttggttataaagtatatttatgattttgtacatctcttattgtaaattttccaaaggtaaagttttgggaaatttagtcaaaacaaaaagtgactccccacactgatgtggcgtgtgttagagagggattctattagaattaaggaactatttgaagcaaagaatactgttatatgtaacggttatattaaaaataagaaaaacttttgaagagccagtattatttacttctttaaaactttgtgttatatttttgaagtggtagtggtgtgaatatgaaggaattttaggaatttaaagtaaaataaaaatgaaataaacttttttctagttttaatgatatggtttatgtttatatttattaaaatattcagttcttaccataataatagcaagcctagctaacatgtctccagtgcttgttatgagccaggcagtattcagttatctccggttgaataattgttttcttcttgccaggttagcctacagatttgttcatgatcaattcttagaagtagtgagggataagtctccatgatagaagacagtgataaggtctgtatgtggcattacatgggacatgtaaaaatgtttcactgaatagtgaaaaggatactgcaattggagtcagaagacctagcctcctccttgttcctccctggcctaacagtgtgacactgggttagtgacttgtcttcataaaccttcgatttccttatctgtaaaaagagaacagtgatacctcatagggctgtggcaaggattaaatgagataacttaggtaaagtacttaatttatgccttcaaaagatgaggcctcatgtagcaggcattcagaaaatattaattgcctcttttcatcttcatgcacaaggtagttgtgaaattaaattggaaaacaatatgaaagctggtttaaaaacatttaaatgtcgttctaatataagatggtattttccaatgagtggtgccttcttcagcactttcagagtaaaatatatgggagaattaaggaaactggattataactagaaaatctggattttactgggtggccatcacatctggaaacagtggtttaatgatattatcttacagtgcaacatgtaatagtattatctatttgcagacttggccacactgtagtctcagttccatcacctattgtttggcttggagaagtaatttaatctctctaatcactgagaatcaaaattatatacattatcttcagaagtattctatatgttaggaagcatctaagtgtggtttttattttgtttattgttctaatttttctataatacagcagttttttgattagacttgtgatggatagaattcattttcacttagtcagaaaatctttctaaatagaggagaattagaaggcaaaaggcaatttgataggtgtgctagtgggaagtaacttcaaatctcagggagccatattaattatagagaaagcagtgccagagaatttgataggctgctagatgggagtgaacagagcaggtaaaggataaagagcattaataaactgatggagtattaataatttcataatctttattgtgttgggtgagatgtgataacagggaaaagattcagcctcatatccttggattgccctcattctgggctgtggacatgtggtatagtgtaaagacaagggatttgaaatcagacttactatttattagaaaagtcatggcactttggaaattaattaattcatggatttgaaaaaatgttacgatctcaaaatagatgtttttgcttatcttttcagttactgtagtcatactaaataggttttgttgttgttgttgttttattttgagacagagtctcgctctgtcaccaggctggagtgcagtggcgcgatctcagcttactgcaacctctgcctcccaggttcaagagattcttgcgcctcagcctcccaagtagctgggatttcaagtgcgtaccaccacacctggctaatttttatatttttagtagagatggggattcatcatgttgaccaggctggcctcaaactcctgacttcaagcgatctccccgctttggcctcccaaagtgctgggattacaggtgtgagccaccgcgcctggccctaaatagattttttaaaatggatgcttagcaagaacagaaggaagaaaacaattcacattttcctgtctttctggtgaattagttctttgattcttaagatcctctagttgtggagggtatgaccagaggacccagggaagacacttctgctaccatctagttggggtactccccagtggtcccagactatggaagactggtcttcctggtttagagtgcctcaataagaaaggacttccatgagacttagcactattccatctccattctcctccgaagtcttttacgttcctcaggatagataactcaaagttggccaggcctggtggcatgcacctgtagtcctagctactcatgaggccaaggcaggagtataaggatgcagggagttataaaggtgccactgcactccagcctgggtgacagagtaagatgtctcataaaaagagcaccacgtatgtggattcctcctccactgtctcccacctcatctcccctccacatgtactctcacacaaagactggagcaaggcagacttctttcactttcactgtgcctttagtagctaactgtttcgattctagtgcaagatggctctttaccaccagataagctttggtatgaccaaccactactgagttgtgtagtaaagcgaggtttatctaaatatgtagaagaaagttgagattctcattagttagaaatttgattgctcgaaatcttgaatttgatgtaaaacagaataagcagttagggaagggaacataatataggctttgtgtattgagagttgcattaaaagaattgcaaagtcaaggcccggcatggtggtttatgcctgtaatcccaggactttgggaggctgaggcgggcggatcatgaggtcagcagattgagaccctcctggccaacatggtgaaaccccatctctactaaaaatacaaaaattagctgggttcgggaggctgaggcacgagaatcacttgaacccaggaggcgtaggttgcagtgagctgagatcgtgctactgcactccagcctggcaactgagcaagactcggtctcaaaaaaaaaattgcaaagtcaatcctaaggcaaagaggctatggaagaaattatgctaaagggatgggaatagtttaggctagacttggggggaaaaatcagtggaattctttttttttttcttgtaagattttttttttttattttaggaaacatgttttctacattagaaatgcaagcattgggggaagttttctcagttccacatgctgtgatgtctttgaggaggtgaggacaggaaagggtagacagaactttaatccttgataggaaaatatatgttgagtgccatctgggaaacttctctctgactcattttgtcaatgttggaaccaagctgaaagtcagtttggttgttcaaaggtctccttaatcatacagttcgggtatttcatttgataaacattacctggcttatcatttcaaaacctgttggaagaatttttgaaatcactaatcgatgggtttaatttctatgaaagattttatttttttttgtggactacttatgagtttaagctgcctcttcctaagagcataatgtctatatcacaagctcatgaagattgtagtgaatggcagcgaaacactgttctttgtataaatgctgagatgtgcttaaatagattccattgacaagctcttggaagtttctgtgttataagctgcatttagaaggagtgagaaaggaaacactgggaggaggatggaagaaaaggaagaagactgtctagagtcttttctgccagttgccctttctcaaagacaaatggacatttgtcttggttcatttggcctactgtaatggaataccataaaccagtagcttatgaacaacagacatgtatttctcacagttctggagtctgggaaatctatgatgaaggtgctggcatgttcagcatctggtgagggcctagtttctggttcttagtggcaccttctggctatatcctcacaagatggaatgagcaaacaagctctctggggcctcttttatgatggcacaagtcccattaatgagggctttgccctcgtgctctaatctcttcccagaggcctcacctcctaataccatcaccttaagggttaggatttcatcatatgaatttggagggcacacaggctttcagactataggtatagtttggtgcttttcaacgcttgttctttttgttactttggcctgcctgtctgacaaacagaagatatgtggtaataagaatgaagcctatttgtagtgcctagtatgtctaacactgtttgaggtgctttatacacattaccatgtattctcaaccagggtatagtagataataacagcatttttgtgtagatgaggaagctagggcttgcagttatgtgactcacccagggttacacacctagtaacaaatccagagaatattgttcagttgttctcttatttgacctctctgctattgacaactgttccttccttcctgaatttttattttcccctgactttcatgacaacacatctgttttttcttctagcttctggtcactcctccataatctctttggtagatcctacttcatctcttcactcagtaaagcctgctattcctacccgttcttcgattttctttctcacactgcatactcttcctgagaaatagcatctatgctcataacttgaattgctgtctttatgctgctgagtcccagatctttatttccattctagatttctcatcttagaaccacacacataaacttaatgatagatttgacattctctacttaaatgtgctataggctccttaaattcagtgtcccacagtgacgttttccccatgattttctcctgggattctgtaacttcgtaaatggtaatatcatccacccagtttctcctatcagaaatctgttgtcgtccttacttcccctacttagctcttcacattttacattccatctccaaattttcctgcttctcaaattaattcacctacctccattcccatgttcacagtcttcagtccccttgggcacactggctgcacacagttgctgtcttctcctatatttcttatctggtagcccacgagatctttctaaagtgaacatttgattttttttttcctgccttttccataactttaccttcttcagtttttccttgttactttcagctttaagctcaaatttctttacatggtgtacacccctccttacctctctagtctcattttgtactattcttttacactagctctttgaatgttctcttgcctctggccttagcacacactatctactgggagtgctttttttttttcatttccaaatagctgactctttcttactctccacagactgaggctagctcctttcttacagcctgctctgatatcatcccatctctgtttgccaagtggattactctcatgtgctctcataacatcatgaagttaatcatttttcatagcatttgtagctgtaacctagtcctctctccaaaaccacatctcagacatataactgtcttctcttcattttcactttatttcattctcataggcattgcacatttaaccttccaaaactaaactcttgtttttctccaaaaccagctgttcctcctgacttccccatcttagaaaatggcagtattactattccatttttaattagaccaaaatccagagttgtcctttgttccttaattttttcacagcccatatccagtccatcaataaaccttactctttatttctttttttttttttttttttttttttttttttaagacagagtctcgctctcttggcctcttgggcaggctggagtgcaaatggcgctgtctcggctcactgcaaactccacctcccgggttcaggagattctcctgcctcagcctcctgagtagctgggatttacaggcatgtgccaccatgcccgactaacttttgtgtttttagaagtgatggggtttcaccatgttggccaggctggtctcgaactcctgacctcaggtgatccacccggcttggcctcccaaagtgctgggattacaggcgtgagccaccgcacccagccaaccttattatttctacctacaacatgtatttagagtctaaccacctctcactgtttctcctactgtcaccctaatccatgccatcatcactttttacctggatgcctgcagcagcctactgactgctctcctgcttctgctcctcctcccctaaagtggttctcatcctcacagccagaatgacccttttaaaaagaaaatcagaggtttttactactctgtgcaaaaccttcacacatctctctcagaataaaagctaaagccctccgtcatctgtcccacttcgcaccctgctttgattaatactactgacctcatcccctgttacttcccaaaccctttttactgtgactccaactatatggctcaccccctcattttctttaggtctctggttcagatgtcgtcttttcattgaagcctgccttgaccgtccatcacagaagagctcactcatttccactctgctcaattgttctccatggcacttataccatttagctagttacgtattttcttattattcttctactcaagtagaatacaaactccacaagggcaggaactggttctcttgactgctgtgttcccagctcctggagcagtgtgtggcctctaataggctctaagtaaatagttgaagtctagggttagtagtatgtcatggacttagcgatataacagacctgctaatgcagtcagtcctagctccaatactgagctcttcaaccccttgtaattagaccgctcctcagcttcagttcctaatcaatagcataggatgtattcattcttacctataatgttatttgtttgggggagggttaaataaaataaacagtatgaagtgcttacctcagtaccttgccaataataaatagttgagagcagctgctgctactaatactgctgctaattctgatcagattacagcatttaaattgcttctgacttgttcatctcttctaccagattttgtctggctacatcttaaacttgctataataataataataacaacaatgtgaccataagaataccagtaataataatagcagctgtgatcatttgagtgcttaccaagtactagagagtattctctaagtcagcacttcccagtgcctcttcctgcagtgatggaaacgttctatatctgctctgtccagagtggtgtggtagtcactagccacatgcagagagagctcttgagcacttggcagtgtgaccgaggaactcagtgtttaattttatttaattttaattaatttagattttaatgaccatgttggctactgtattttaaaactctaaattctttacctacattaattcatttaatactcaaaggttaagtagattatagatgaagaaattgattgtctgagtggtgaagaaacttgcccaagattacacagctaatacaaggcagaactgggatttaaaggttaaagacctagataatctggttccagggtctgttgccagccaccctctgtgctgcacctccctcgtgtcattctcaagaattaaagtcttacaggcaaaggactgaggtggcatatctgtattcttgctgcagggaaagctgagagaatttctggttcttactgcagtgcaatatcactcctaaagtgagaaattcccagatttaggataaatgttcaaacagttctagacaggtaagcttggctactcaacctctgtgtacacttttttccaagacttaaatttacaaatatagtggcagcaacaacaaaatgtttcctcctaaggtgttgcagctatttttctaaaagcgaaaaatatgctctccccctccccaaaagggggaatgatacatcttaccaggtaccgtttccagcttgaagtccaagatatctgagctgagcttattccttttgttaaggttgccttatgtcgctctacaactagtgagccagcaacttatttttataaaacattaggagaaaaagagaaggggaaattggttaaaaacataaatatgtttatgtcagaccaaaaaataaatatgaatagatactttagtcttagcttttgctattggttctgaatccaaagttggtatttttaattcccttcctccactactcattccatgttctttttgccctcagccagctctcagctaattgtagatttttatctgtagatttttatctgactgacgtttatctgacaacactttagactgtcattcacaggggtgaggaaggaggctttgagttgttggtggtcctgcctatatggagttatttctatcttccattatctttcaccgctagatgtggtcaaaccaacaggtgttccaggttccagacacacacctcccttctctcatcctgttgcaacaatcttctttacccttgataatcaagattcattaacacaaccaattctgtcacctccctttttgtccctgttctgtgtcatgaggagttcagaattgctaggttgcagtttaagcttccaaatcagtggaggtattgttgagtcccttggtgaaatcattcttcacttgggtgctgagactgttaaaccagcagaaccagagtcgcagtgatgggggaattgcaagttggtcattaggtgtgatgagggggaggagaagatgtgtaactaattctgcttctgtcccttggttactgggccctgtattatggctgtgggagaaacaatgttttgtattattcactggttctgagcatcttgggagacaccaccctatctaattttatttggaactgaatcttcagaagatgatttcagcattctgaaagatgatcttctagatgatagggtatgtggtaagaagagcaatccattagcatcataccatcattgtactctttcactgttaaatcttgagtgagataccatggtgatgaatgaggcattcagtcattctgtggatggcagaggtatggtggacaggaaaggcagtttcatattcagaatatgtgtcttttcatatgaagactgacaagtgaccactgaaagttaggatgtatgtctgaaatcatgtatgttttcataaaattaaatctattctgtgttgttacttggaggcacaagcaaagtaaaacatttaaggtgaacgggggtttgagtaagttgaaactggctgacactgactcactatgaccttgggcaagatgctgaactactgcgagctgcctattcctcatatctgtgaaattgggataatgatatttttgtgtatataaggctttgaaccactcagacgaaaggtgctgtgtaagtgcaaagtgttgttaacaacaatactgataatcctcatttcaccttgccctcagtatgacctgtgtttaaattgagcactgttaaaaagattgcctgtgaaatggtatcctgtatagttatgttgctgtatgttctcccagcacttgatatatttccttcccaacactttttatagtttgcaataatctgcttgattatttgaatatttgtttcccccactagatccaaaaacctctgagcacaatggggaccacttttgtctgtttgttataatatctccaaggcctagcatggttcccacatgtggtagatgttcagtaaatatttactgaatgaataaatgaataaataaataatgcatgtttctgtgaatttctgccaaaacaacacaaaaagccagagatgtaaaatcagtttcgtttcttttccaccagtacgggaattctaatgctgtattctgtgtaaataaatcattccggttggtcatcgtattatagtgggcatggtgccatgggaaatttattggagtaatttttaacagcctaaatgtttagtaacagatgcacatagatggcaggttgcctcattcagcttccatctgttagacaactgtctattctaataagactggtctattcaaactagacaaataacattcttacccatgtttaagcttattcattttcacaatttttccgaaaggctcgaaggaggaaaggtgtttccatgtttggttggctgctacttaatagtagtgtattacaacaccttggcaaaccgtgaagtccacttgatgtgtcgtaatgctcaacaaggaagtattctctcttaagtgttttgtcaaaagtcaaaaccatgctaaataatggcactaggaaacacactcagctacagataatttggtccaatagagttcagtgtaggttgtgcaactggcaacagaaactggcatgagatgaaggggtataatccatgctggtcatcattagtatgtgtgatttttaaataggacagaggcaatatactaaactctagaaaatatagtgtgtccatatgtacatgcagttaggttatacccagtgaaagcatgatgattctcagcttgggcatgccttttaagaacaactttaccaagtttttttttgctatataaaggtggagacagtgttggcctatataaatttaccctgtgcatgacgaattgggttggtggtgtgtcattaagtgtgggccaacttccttaaatgtcttggtgcttagcataatgcctggcacccaactgggactcagtaattatttgttgaatgaatgttctaggatcagttgaggcaattccctctggatttctagcatgaaagcagtcccataaccttagatcactatgaattaaaacttggaataaaaagttggcatacttagagtactagtactaagcagaacacaaagcaaactgcttatcactagtatgtgtctgtgataaacttctgaaggctgtgtcatttcctaaatgtaaatcactgggtatgtgttattttgggaggcagacatctaacaatggctgttttggagaaagtcaatctatctgggtcttggttcagttacaggaatgactaattttatactagattctcacatgattcaaaaagtgtgtgaatgactcagctcattaatatccttagctcctgtgatctcccctcccagtgaaacgatggttataaggcaataatgataattggaagaggaggagactttgactttgccccgtggcaataaaatgacacactttaagtaattacatgtgcatacaatattgtttgaaagaaatgagttatattatcatcatataaatacatttaatatttgtgttaaaatatggtgaaaataatatgtagtttcagcgtggatgaggactgagttctgctttttgtttctaccattatcttttttcctgaaacaacaagcctctatatggacagagccatttggagccctaacttagttcctaacagtcaactcattgattaccttctccttgctgacatagagaaatgttgcagtcacaggggtgttgggttctaattacatgtagctaagtattcacaagtgattttgagctaaaatgagcaattcgttgaagagtctgtggaatttctggggatttgcgtgtttcttcctgttactgtttctttctttttgcagcaatttattaaacaaagacctggatatttggagtcagcctttgcgcatatgtctgctcttgctagagtctctagtgactcaaaaatctaatgcacacttttcacttcttatttagtttcacttctctgcagcatttgacagatctcgaaattccttcctaaactttgtggatattttcttttggttgtttcttaactcttacactttttctttttaaactcttctagccgcccttaaaatgtgatatcctccagagtttggtcttggtccttttttttgtttctatttatccagtctccttggtgatcccattcatttccatggtttccattaaaatccatacactggttgctccaagtgggtgtctttatgtcagtcttgatgagctatagacctgtgtattcagcaacactggagatatgtatagatagataataatagtaacaacaatactaacagctactcattattgaatattttctgcatcagacaggtgagcgctttattgcttcatttatttacctcacagcgacactatacattgtcttaaaaaccagaaaaatgtctcataaagatcccgatttctaagtgtcctggaaaagcctgggcttgccttcttacctggcagcagacatcggcagctgagtaacagctttcctcttacctgggacttgtaccattacttcacacagtcctcaccacttcctattggcctgcacttattgtgagtttcctcatatccttgctggtctagccccataggcatttctgacacctgtaaggacaattgacatgctttcccagctggttgcagacttctctattttttgccctagtactggaatggttttctcaaatgaaatttgttacttgctttctcttaatagttttctatgtatgtttctttatcacctcctcctctacccacaactttgttaaagtctctatgctgaagttagaaggaaaagaataaaagtttttgatcatttactatgggccagagttaaacacaggcttggtttagttaagtcttcacagcactgaagtgggtgttcctgattcctaattaagagatgagagaatttctgggttgaagaatttcaacccagagtggattcagatctgtctgatcccgagctcaaagttttttctcctctatcataacaacttctagctcctgttcctctatacaaataaacaagtatctttagcactctcattcccatgatctgcttctcatcttgttcctcctttgccatcaaactatattcattggttcacacagaactctgttaaccccttttctcatctcaacacagtgtaatttagccttctgataatttactcgttcacccacatcatctgagcacccactgtgcaacaggcagcgggccagacactagggacataatccttgtctgagagaagcttcatggagccataattccagcgctgtgtgcagaatgccttataattaaatccagtggatttaaggattagcccttttcttacttaagctcacttgcatcattttccccaaaggacaagcacttctctaatggaaattttctctttcctttcttctgtagcattcctcactgctggttttcttctttagtttttcagagttccttttgcatctctcttctttttcttccagtgccctcattttaaatgtttctagcttcgtactaggtaacttcacttcaaagtcttacagtttcagtgatttctgctgctttcctcaagacaatagcatttgactagctgtccacattaaatatcttggaggcatcattactctcttgtcttcctctcacaacaagagttggtgattctgcttctaaaacagcatcccagttgccagcccctctgccattagttaacatatggcagcaactgccctctccctccctctcagttgtgtgtcctccaggcattaacaatagtaatcattttttttaaactctcattatcactttaccccttgaaatcttgtagtgtctttctcgctgcctgttgggtcaggtctcagttctataacctggcctccagagctgttgaccgtctgctcctgatccactcttctggtctactctcattttagctacagtgcttagcacacagagagcactcactgaatactggatgagtaagcgggtggtacagaaaaatctgaccttttgttgtcaaagggcagaattaaatttttatcatgtaagtatggtacctactatttacttctcagtaacttctctcatttttaaattataatgatataaacattaatccagtgtattgtgtttctcttaaattcatatgttgaagtcctaacccctagtaggacctcagaatttgactgtatttggaaatcaggtatttaaagaagtcattaggttggctgggcgtggtggctgacgcctgtaatcccagcactttgggaggtggaggcgggcggatcacgaggtcaggagatcgagaccatcctggctaacacggtgaaaccccgtttctactaaaaatacaaaaaattagccgggcatggtgacgggcacctgtagtcccagctacttgggaggctgaggcaggagaatggtgtgaacccgggaggtggagcttgcagtgagccgagatcgtgccactacagcctgggcaacagagtgagactccgcctcaaaaaaaaatgataataataagtcattaagttaaaatgaggtcagtaagtgggccttaatccaatatgactgatgtccttaagaggaaatttggacacagacctgtgtagagggaagaccatttgatgccataggacccagccctgcttggacttgccctgatcttggacttcttaattccagaactgtgacaaactaaatttctgttgtttaagccacctaatctgtggtactttgttattgcagccctagtaaattaatatacctagtatcttttaattcactgagattctaagtcctgtatctgggtagactttattattgggaaaaggatggacctaataatctagtagatctctccatctcaaatttctttgaggtatttgaaatttgaccaaggaagttaaaggctacagtaaactgtgatcatgccactgtactccagctgggtgacagagcccgaccttgtctcttaatttaaaacaaacaaacaaaaattctcctaagaaaagaggggcatctttatctttttcatgctacatgattagccactcaattttttttcctttcattaatctgtgtctcttagatattcaaacaaagcaagaaaccattaaaaaatagttagtgcccatttgttttattgatttaaagagataatgagttgaatgtttttaaatttcattttgatagctagagtacagtcagttctctttgcaatggatggccatgcagactcaaactttcagagaagacatttacagcagtgaatttatgtgctttacagcagttttctaaaagttctggttatggggggaaagcacagtgaatcactaaaaatttggtttattcagcttttcctagtcatatttcaggttgtcatgttgtcagacctcaaaatgcctctcccctccatcctcactgcccccactcagtcttcacctcctcagcagtggttgtagtggaactgtgggaattaagtaggttgactgtgttagagactttgttggaaaacaacattcagattttacttattatctgcttagatcatcccagattacataataatttcagactgattacaccttgacaaggctcacctgaatgtcttcctataatgttaccattaacatcttaggtggatgtgagtccattttattttataaatccagaaagagcgcctataatccttttctaagaaccagcaatttattttctaggtctgctctcaattcttcatgctacaattttgaacttcttgcattttgttctattatgtagaggtagaggatagctagtcaccgtgtataatagctcttattcttgagatataaggcactattatattgcctttctatcttctcttttccaaattgagctttattcgttctttagccatacagtacttctgttaaatccttaattacatataacacttgtcattaaagcctctccatgttttctaaaactctctttaatggtgaatccagcacttgggggttagcaatacaagaagacagtccgttcctacactaaaatataaattttacacattttggtttcatgcttaattctcattttctatttagtaatcaaaatgcatagcaattaagcaaaagaagattatgtcttttctctgtgacaaaagttaaagcatatactttgcagataatcttttgaattcatatgcattgataactcagattcagagagattagaagtatatgctactgactagaaccaatatcaagaattttctgtatctaacttgtagtcttagcattacctctgactagttggatgtagaagataagtcatttgacttctttctaaatcattttatttatttgtgaaactggggggaggagatcaagattagattatctctaagctgtcttccagcctagaaattgtactatatactaataataatggcagctaataaattgtggcttttagtgggtaggtatatttggagctaataagattaacttatttgaaatacatgttgagtactacctactgtgtgctgggcactggtaataccgtgataaatcagacatctttcaaggagtttattaggggaaagaggcataaaaataagcaattgaatattcctggagtggtggtagaagtccgtctaaagtgtatggggcacaatagagagtttggtgagttttgcttggcagcaggagcatcaggaaagggccagtgatgaaagggagcgattatgaaggcctgatggagagcagctgcagcaaagtgataaggcagcagcttgactatagtggctaaagctggaggatgagaaggtggaaagagtggctccttttttcccccaaggaggtggaatatgaacagaaaataactgggggcagggagttgggattataagaggttgtttgttttaaaaaatgggtgtgaagagcctgtgtaaaggttcttgagaaaagagcccgttgagaggaaagtttgttgtgaaggagatgaagatgtaataaagaacagggttgagaatggatagcgagatagatagatgaatagatatgtgataacatacacagagcagaatgttaattgtggcacctaggaagtagatgaatgagtgttcataatatacttccttcaacctttctgcatatttgaaaatttataatattgggaaataattttataatattggggatggaggagaacatgggttgagaatttagccttgaacagaaccagggggcacttattccttggcatggcaggacattatggaaggtcaaggctaaagccccagccacttttgtaaagcagaagtgactctgacctgctagggtggagggccaaaaaaaaaaaaatgttgagcatgaaggatggaataaccacttgtgagtgtgagagaggactgagcagacttgggtggtgatgctcaggtctggtgaagttgccacatttgtgattttccctggcagttatcagaagacaacaagttagtaggatcattgaagggccactagcttacggaagccaaaatagaatgagtagttggcatgaatgagtcccttcagtatttgccagcagtctgtcctagaacatgtcccaacctctctggtgctttgttcaagagattgttttcaacctcactatcttttgctttgaattatctgagataaaaacaatgttgcaaaactttgttaacactattattattaacatttaactcaggtaattttgttgtctcccttaggtgaaagaagaacgtccagaaaaaataccagatttaaaattattggtagagaagaaatttttggctttacagagcaagaattctgatgcagactttcaaaataatgaaaaatttgtacagtttaaacaacagctgaaagaactaaagaagcaatgtaagtcaacatgctttgctttggttcggctttttgaaattagggaactgacttgatgaacagccccagttaactgattttataaagtttgcttatctgcttggcttgatcctcattctaagttgcgttttattgttgttgcaattctgtattttgtctaatttttggttcaaatcagcctgctcatttctgaaagccaacagtttccacaaagtgctcagaaaatttcccagcagctagttatgtgtattgtcccattgctggggagggaaattgggaaaacaaaataaaagtgaaaactattttatttaaataacaatggtatcgttcaagttttaaactgctgtgccatgctttaaaataaccatactttgattctggttttgcctctttggagtaatattagctatgttttctctcagaagaccactttatcttctcaactatagaccaaaatctccttgatccattttagcattgtggtagtataaattccatgtggtttttaaattgttgccttcttaataaactattacattcaagttttttagtggacataattttgacttaagaattggagcaggcaatgtaattttttataccaaaaaaattttttagacagtatttaccagaaataatatatcatttctgcacagtaaagtatatatgccctttcttttcccattcttccatatggtccacataccaattttatataaattgattttttcacattagcatctatttagtcctgtagtctttgcttcttttaggattgagacgcttgtatttcttaaagaagtgaatagtgaagcaaataaccttttctaactttagtctcccaacaccttcatttacacacacatggagcaggagtgttgtatgatatgagacataaatttacctcgtgtccttatatgtgcttaatgtagggattcgtattttgaaataggctttcttttaaatataagcattttctttaaattgatgctgagatctcaaaaaatgactgaggaagctgcctcacttttgtctattttacaaataacttaagtttcacaatttggaatgttttgcaatcatgatgagacttttgtttttactgtagacttaaccagtaagcattttccccatattttaagtttatttttgttcttttttttaacatcacagctcccaacattcttctaatgtatttttcactcttccctcaaatgattaataatttcccaaagagataataatttgccaatggctttctgatcttaaagatgctagtgaattaattgtatagccatgagaattagacattattccccttaaatatacatgggccatatagtctttaccttttatccatgatatttattactcagtggtgtgtgtgtgtgtgtgtgtgtgtgtgtatagtatctggcacatggacctgtgattaccagcctgaggccaacaaacccctcagttgggatgtagagattaaacaaagcttttaaaagctcacattatatgacctcaagtttgtttacctggtcatctcatggtaattagaaactctgattggcagctttcgatttcttgattaaaaacctaaataaactgattgttataggcattttttcaaaggcattctcagtgaaaagaccgagaactattctatttggtgcttagtgaaaatattttgaactaatatatgtaccagttattaacatctctttattaaatgcaatagttttttgtcaaataaatagcaatttttcaatcttgaaaaaaaaaagatgctaatgaatttcagttttggtgttggtctaagtagccaaatgtattttatttgactatttggagccagtactcataaactgtggcagacttagcatccaatcacaattcctgagttttaagtaattttataatacaggttgaaggacaaatattcaaaaatataaattgttccttcttttgttattgtttacaaagttattattccacaaggtaaaggatgaagacttttagaatcatactcatggagaaacactttctaattaagaacatataattcaaaaaaatgataaatgttgaaatcatggctattacttcttaaatctctctaaaatggagttggaaaaagaaagaaaatgtttcctcaggccaccagtacacattatttggatagacagtcaaaccttatgtatatttatattgaaagaaatacttccttataaagtttccctgtatattgtaacactggaattaaaataactttcccctaaaataattaaaataaaaatttcccctagaattttattttaaaaagtttttagatttcaaatgacagaacaagcaaaatattaatacttttgaaaaatactctataagatctgtataccttacttgcaaaatgtaattttagtgcagtattattaatataatacttgtattatactaatacaagttgatacaagtataaacttgtaccatgtctagtggattttctttctttagatttaacactgttgtgagggttctaattaggatcaggctcccacagtatttgtgtagccaggtcaaaggtacactatgatatgtaaatgagctaatgaatctgttttgagatatgttctggcggcaaggaattacaataataatttttttgtttttaaagattagaaaatagaggccagagagagagacttgcttctagatgcctgttttgacagagtaaaggctgaagtgcttttatggtctacatagatccaaagagttcttttatgaaaataaccaccatgtcttcactaactttattatataagaacataaatacatgggattacatttgacaaaatcaggatctaatcagagaaatgctaggaatcttttaggtggggagaggccaagatacagcttgcaatgaagttgtctcccaggtggttttgtctcaagggcaggcctaggtacactctgctggcagtgcaccagctgtaagttaatctatctgtggctcagcagctggttctcaaagtttttggtcttctgctcccattacattttaaatttttttttttcttttttttgagacagagtctcgctttgttacccaggctggagtgcagtggtgcaaccctggctcacttcaacctctgcctcccaggttcaagtgattctcctgcctcagcctcccaagtagctgggattatacgtgcatgccaccaaacccagctaattttgtatttttggtagagacgaggttttgccatgttggccaggccggtcttgaactcctgacttcaggggatccactcgcctcagcctcccaaaatgttgggattacaggcgtgagccactgcacctggtcacattcttaaaatttactgagagcccccagagagcttttgttcattggttatatcaactgacatttatcatattagaaatcaaaactgaagaattctaaaaatattaacatatgaaaaataagcctattacatgttaatataaacagtatttgatatgggataccactttacattttataaacataaaggaaaaattattgagaagagtggcattcttttacatttttgtcaatctcttcaatttttggcttatttaaatagaaggtaactagctcctcatatttgcatctgcatttggtctattttgttgacgtacacaaagaaaattttgtctcacacattggtaattgaacttgctgaaaagatcttgcagaccaccagaagttctcactttgacaactctagatctaggcctggggtcagtaaactctgggccatggaccgaattcagcctgcctcctgattttctatggcctgcaagctaacaatgatttttatgttttttaactgttggagaaaaaaatcaaaaggggagtaatatttggtgacttgtgaaaattatatgaaaattctatttcagtgtccataaatggtttcatgggaacatagtcatactcacctgttaatgtgttttctgtgggtactgtcacactgtcatggcagggttgagtgagtgcatcacagatcatctggttagcaaaacttaccgtatttattatctgactttttacagtagatgtttactgacccttgatctaaattatattcagaagtaacggcagtttttatttttttaattttatattttttccctgaataccatccatttgtctcaagtacattcagaacactttgaggattcactgtgtatgaattactacagttgaggctctgaaataaataaaaagcaaaaagcaggaatctgtacatgcagaagacagtgtatacaaacatgatataatatgacaaccattaataacaaatatcaactcaaaagcaaagaaaacatcagaaacaaatgttatacaatgtgggacctaagtgaggagagtcaaaacaggaatgccatgccagtcaactgatatggggctctctggagcagtaggtacagaaagattttgaggctgggttcagccccagtaggaaagaatgtgctaaaagataacagtgggaaaggagagggcagtacagatgtctagtatttaccatccccagaatacaaacctaacagatatactacactcatttagagatactgttactctaaagataatatatttcagttacacacaatgattttcccaatagttatgtcttatagatattactaggcattagatataacatctttgaacaaagaattttatcctttagatacccagtgtcctgtatgttagaaataattaggtctgcctcagcttacatctcagggtcattaccaagattaaatgagatactgactctgctagctctaaaagctttagatttaagttattgaggaagagctagtacagcataatggaaagaatgtggcttagcagacggaagacttggatttgagtcacttaatagcagcctactctcccttcagataccgcctatcttagatacttctaattcttggagtcatagaatcaagattgatcgaagataacttctacacttctagacaagatgactaggatagtgatggtggtgataactgagttagggaacaatttcacagagaagaatttcttaaacagtaatcatattctcactagcccaagttgtgaaatgaaacaatatgattcggtttaaggcagacataaccagactttcttgggtgaaataattttaatttagctagacaatatggataattttctcttctccttgccttaaactgccttcaatattacagctcatggtttcttgcagttttaacatcaggagaacttaattagaatgtgtgaactcctctgtatagatacttcttcaagtcatcaagcaatctttctggcgtcttttattcatttacctgttacgtgactatcaggccctgtagattttagtgtacatcagcaaaggcagaaattgagggcagttgtcaaagcccttatgttttgaaagtttctaagattgagatttagaaactttcaaaatataagggctttgctttatgttcaaaaacagaattgaatgtgaatctgaaattttaagtgttaatttaatatgcaatataattttgttagtatatttaaatgctaagcttaaaggagaacgtatcatattatcttttaatgaaaaaaatgcttatctgaaaaggttcaccacaaatttagacagtatatttaggtcactgttacatatagaatatatggtatggagataattgcagctacaagtgaaggttataaatcattttgaatgacaatgatatttgtatcagacatatagagacataggaattcacattgtaatctagcaattaatatggattcattttaagcacacccaatctagatctcaaaactgataaaaggagggagcggccattcactttacaaaaggattctctgaaggatactattaagtcttctcaggaacattagaacaccttcgctttactatttttagttggtggcttttccgtctccttcagcatctactcaaaaccacagtgtagttgcacaagggtagtggtttttatgttttgcttactgctgtattccttgaactccagcatgaggcctaggtacagtgtagtattaccatagcacaggtccttgatggtcacagcagtcttccaaaaaaccatcatgtgcttgagagcttctgtgctactgaaaggggacacctgtcacccctgccagcctattgttgctgtgagtgggtgtggacccactgttgccagatcttcaggttgttttagaaaactcagaaatctaagttactagatttttctgtttttcagttactagattttaaaaacactgttcaaacaaaactgttagtttgtaacctttgcctttactttctcataatataatttttttagtgccttattaggcactttaatgagagacggcagccgtttaatttactgttaatttgtgatgtcttcagaagagtgaatggttttgctttcaggatactgcgaactaaggccaaaatgtgcagtttgcttcatttgggaatgtgtattgtagaaacctgttgggttctattgaaaaagcagatgggggttttgtgatgggggccaggtatgggagccccctcatccagatgcaggtgaacagtgtggttctagagaagactagtgattggaaaggtatgtgtgagttttgaaacttggaagaagacagatgagaagtaaaccaaggtagtgccaatagggaaaatatttgacttttcctagaaacatattgagtgcatttaaactgggcaaagtatggaccaacttgccttcatcctgatactattcaacttagaaatgttttactttgtcataaggtataactgttgttagaaatagataatcagtgtcacgaagaaaagtcagcacagagacaaaggacctctcagcaaggcaatctttactttctgcagaaagggtgctccacacagatggaataatgacaagagcacacctgaacaaaggaaaagcagacatgtttatcccttatgcatttgggtcatccttactgctctgtcctgcatccattggctggagctgaacctcacaatcttaaactgatactcgatttgctaatagcctaaaactttcctaaataggtaagtgcaacgaagaacaaagaaggagaggaagttgcttatgaaaggtttaaggctaaaacttgcctgggcctgtccagacatgcctaaataagccaaagcaactaactgggctaaagtgtaagaactaatagttgataggaggctttagagtaaggaactgttattcctagaacagatttattcaactgatcagataagctgcctagaaaaagagggtcagaacatagttaaggcagtctgatgataaaaatccttttcctctcaatacatcatcagtaaggaagagaaaaatagaggacaaaaattagcatttatagggttgagatctaaaatcagtagaaaaggttaaaaatttatattgtctttgaaaattccttaaaatgctcaacaaaagtaaatacataattttgtgtatataaccctttacaatgatatgttggcacaaacatatagtatatacagcaatacacattttttaatatcacagaatatggcttaagtcacttaagtgtgactgcttagaacattcaaacaaattgatgaagtttgctggctcttctatggttttaccatctctgtgcctctcagcaggtcttcattttttccttaaagatgttgatgaagccattgccattaacttgctgaataattgttgggagatgctaaaaatcttaaatgtcacaaccaagatggactttttcaggctggattgcatcctgagagcttatgttcattgagtgaaatttctgccctacacaaattttttattctttgagtatttgcctctctcctctttcctcctctctgagtcagcatctgtctgactcttttctgtgtgtctctttcctccctgttgctttctttgtgtctcccactccataagttttctcttttctgtaaattttgacttacatcattgcagctgaagaggttatccccatcttcatggtgaagcagcctcagagagatcaagtgacatgcccaagaacaacaaagctagtgaacagtagaaccagaagacagacggtgccaaggatgaagagaaaacattggagagaagtgtagctactctctctcttctcttttgtaaagctgttactttttaggaatgtttacattttaaagtagatttgggggaccaaataaataattaagaaaaagattaattcaaattaaaggattgattccatagtggtggagttttaatgaggtcattaagctgtccaggagttattttgtagtgagaaattaactttttctacatgtcctttatattgtatagtaaaagcactcatctactctgcattcatcttaggtttgccctattcctattggatgatagttataatacaggtcataggcatgctttgtataatgcctagtacctaaagtactgagtgctggttgaattaatgaataacagccgacattgtttgagtgcttacctctgctcaggctattgtacttgcagactttatgtacattattatgattattttttgagatggagtttcgctcttattgcccaggttggagtgcagtggcatgatctcggctcactgcaacctctgcctcccaggttcaagtgattctcctgcctcagcctcccgagtagctgggattacaggcacccgccacgccacctagctaattttttgtatttttagtagagacggggtttcaccatgttggccaggctggtcttgaactcctgacctcaggtgatccacccgcctcggcctcccaaagcactgggattacaggtgtgagccaccatgcccagccattatgtgcattattatttctttctttcagctctattagatggctgtatccattttatagatgagaaaataagcaaagagatgtaatataagttgcctaaaatcctgatgctgaaattcatacccaggtttaggtgataccacagcccatgttctttcccacataccacaccaattcttgaaaacacttttgtgtgttttttctttctctcaattcaagcataccattcatttcttggaaaaaaaaaattgacttttaataggactcttgaagagtgaatcatctgtttggatcttccagatcatagaactgccttgatgtactttgatgacgctggaggaatctgcttcatctagctgagagagaatctttttcggtcacttgcatttagagattagggagtagtaatgataccagacattacatagcagttcttcttttccagatctccatggttttggcaattcatttagaatacagtgcctaagaattatgtttctggtggaatagttggtgtgttatggcagagaggaggaggatatttatggcatcccaagtttagaacaaattccatgaaatttatttcaaacataacaacagtaatctcttgcacatacatcatctcgcgtaatctttacaacatccacacgcaggaaaggaatgcatgaaaagtacaagttctgtttttagcagactgaacaccatataataagaatcttggaggtgacatatttacccagtgtctcacagtcaagaggccacaaggatagcaaatacgttcacaaggaaaggggaagttttaaaatgacagatagctataattaaagttagtgaagaaaggttcagttatcaagggacaaatgagtcagcagcaagtttaaacacaaactgtgaactctgggtgtttctctcattgtgacttattttaagagagtatgatgccatccacactcagaaagtagcctgaatctagattaggaagaccaagtcttaagtgtcccagagatgatgttacattatacctaagaaaataattatcttgttgagttataattcctgaagttagaatgatttaagtgttatatttgttagatatactggaagtttcaggcaaagttattgagcatttctgtctacttctacttcatttttaaaaggtttttttttttttttaaagaaagtttaagtagaattttggcatcttagtgcgtggtgtgttattgtgtgtatagcaagtagacatggtttactcattaactatctgaaattttgaagtcaaatgaaatgtttcaagttaatattgtaatttggctttataaagcagctataattgaatattatatgtatatggtagcaaatagggaaaaaactgcgtatagaaattcagagctacttgtatagaaatgcattgttggtgaacaacatttgaaatcgagcacagtcatacaattttacacattcaaataatactaatgacttgctacatttcatttcaatttaagattttaggagcattaatgtggtatcacaaaaagggcacaataatggaaatcgaaagacctaacttagacattaatgaatggattctacccactctggcaattcagtttctgtctctggatctcatgtcctcacataggggaaaggcttcatctgtaaggctgcctgccagatgatgatagatgatgatgacgcgctctactgctaacatgtgctgtcttttcagtatcattctaatatgttttctttggaattccatactttaaggagatgttctgaagtaatgaagcaaaagttatttacaaagatatcctttatgatattatttgtaattaatatattaacaacgtataatagttgaaggctagttatgtaaaatatgcaacatcaattcaatgaaatattttgcaatcattaaaaatgatgtgaggagttttaataacatcaggaaataaatgcttatgctattaagagttaacagggtataaagttgagtattcagtatgattacaagtaggttaactacacatttatgtaaagtagacttcatcaaaattaaaacctccaacttatcacgacagacattaaggtagtgaatggacaagctacaacataggacaaaatattcacaaaacatgtatcttacaaagaatatagtatatccagactgtgtaaaaaactggaactaataataagagacaacacacttctgtttaaaaattagcaaaggtttgaacagacttcacaaaagaagataaacaaatggctaataaacatatgaaaaatattttttaaaccacattcatagaataaacactgctggttgtagcattatgcttctaccttgtctctttatctaccttcattttttaaaatgtatttattcttcactagttttctataaagagtctatatagttttataatcaagaaaccaaaatccctcaatttactgagaaagaactattggttaggagtgacaagcatgcttgggaggatattttcttagaaaagaggtaagtgttgtaaaacaaaacaaaaagcgtatttcttcttctaagatttcagaagaattgaaagaagaaaggtacatggctgctttatcttcacccctagttttatcctaagtgtgccccttcagtctctgcctatcactgagacagtctggtggacagtgagaagcagcctcataattaccctttgttattctctgttaactctcatcatccccattaactgtatgtcgttgatttatttgccaggtccttgtcactttgtccttgaaatatcagaaagtgttagtggttcttgtggagagtgttgcctctttgtatatgttgaaagaggaggaggaatgcttgcaaaatgtattgtatgcatgactgtatttcataaggcatattttagcttacaaagcactctcccatctattatcttatttaattttcacaacaacttagtgtggtaggtagatagtattaatcccattttacggatgaggttctgcacaatcagttgtcctgcacagttctatcaatcaacccccaacaaaaaattctcctgtgccactttgtagttgactcctccccccattcccagcccctggcaaccactgttttgttttttctatatataattttaatttttccagaatgttgtataggtagaattgtacagtgtgtagccttttgagtggcttctttcacttatcagagtgcatttgacattcattaacagtattgctagttatctgcagtttgttgcattctattgctgagtagtatctcatcgcatggatataccatagtttgtttattcatttaccagttgaagaacatctcagttgtttccagctggtggccattatgaataaaactgctaggattcatgtacagagttttatgtgaatatgtcttaatttctattgagtaaatatccaggcataagattgatggctttggtaagcatatgattgctgggattagtaagcatatgatgtttagcttataagaaatggacattttgtcgatattatttataaaattttaaaaaaaagaaatggacaaactgtttttcaatgtgcagtctatgagaattgcaccctcaccagcacttggattatttttcgttttgtttttcattctgctattctaataagtatgtagtgatatctcattgtggttttaatttatgtttttctaaccttttttatatttaaatttttcatataatgttcatgtttgtctattagcatatcttctacatttattctttaattcattccagaaacactataggtgacctgtagcaatggttcttagagtgattctcataccagtagcatgagcatcacctagaaacttattaaaaatataaatttttaggttctaccctagacctactgaatctgaaactgggagagtaagactgaattttcagctctccaaatgattctcctgtaacccaaagtttgagaaccactggtctacagcggaggtgctcacccatccctaggcgtcaatatcaactgtgaacattaaaaaaagaaaagaaaatcagagttcagtctctaccccagagattcagattaagtttgtgtctggtaagtccacaggcatttttttttaatgttctcctggcaatgctaatgtacaatgagggttgaaaataatctactgaaagttgtttactaggcgctctaaacgatacaaatctgacaccaattccagatctgatgcagcttattatttaaaagggaggatccatacaaacatatcttagcatagtcataagcacatacatataagtcacttagtaattacctaatgaattaaattgtacttggtgtcctggttttaaatataaatgaacttcatttacccatatctcagagcctcattttgaaactcgatgttgtacttagcattcattcattcaacagatgttcatttaatatgctgggaatatggcagtgaacaaaatagacaagtctctatgctcatggagcttacattctggcactgaccatcaacccactttacagtattttgggggaaatatatttctttataactctaaaacaaatatgcctatttattgatagtcttaatcatgatatttgtgttatgctcaagtactgtctttcagagttatttgccttgtatttgttaaagtttatgttagtcattacattctttttcctgaataactttttttttttttttttttttttttgagatggagtctcattctgtcacccaggctggagtgcagtggtgtgatctcggctcactgcaacctccaactcttgggttcaagcaattctgctgcctcccaagtagctgggattacaggtgcctgccaccatgtgaagctgatttttatatttttagtggagactgggtttcaccgtgttggccaggctcctggtctcgacctcctgaccttatgtgatcctcctgccttggcctcccaaagtgctgggatcacaggcatcagccaccaagtgcagccctggataacttttttttttctttttttttttttttatactttaagttctagggtacatgtgcacaacgtgcaggtttgttacataggtatacatgtgccatgttggtttgctgcacccatcaactcgtcatttacattaggtatttctcctaatgctatccctcccccagcacccctactccctgacaagccgtggtgtgtgatgttccccgccctgtgtccaagtgttctcattgctcaatttccacctgtgggtgagaacatgtggatttggtttcctgtccttctgatagtttcccaagaatgatggtttccagcttcatccatgtccctgcagaggacatgaactcatcccttttatggctgcatagtattccatggtgtatatgtgccacattttcttaatccagtctatcattgttggacatttgggttggttccaagtctttgctattgtgaatagtgccacagtaaacatatgtgtgcatgtgtctttacggtagcatgatttataatcctttgggtatatacccagtaatgggatcgctgggtcaaatggtatttctagttctagatccttgaggaattgcccaactgtcttccacagtggttgaactaatttacactaccatcaacagtgtaaaagcattcctacttctccacatcctctccagcacctgttgattcctgactttttaatgatcgccattctaactggcatgagatggtatctcattgtggttttgattgcatttctctgatgaccagtgatgatgggcattttttcatgcgtctgttggccgcataaatgtcttcttttgggaagtgtctgttcgtatcctttgcccactttttaatggggttgtttttttcttgtaaatttgtttaagttctttgtagattctggatattagccctttatcagataggtagattgcaaaaatattctcccattctgtaggttgcctgttcactctgatggtagtttcctttgccatgcagaagctctttagtttaattagatcccatttgtctattttggcttttgtttccattgcttttggtgttttagtcatgaagtccttgcccatgcctatgtcctgaatggtattgcctaggttttcttctggggtttttatggttttaggtctaacatttaagtcttcaatccatcttgaattaacttttgtataaggtgtaaggaagggatccagtttcagctttctacatatgactagccagttttcccagcaccatttattaaatagagaatcttttccccatttcttgtttttgtcaggtttatcaaagatcggatggttgtagatgtgtggtgttatttctgaggcctctgttctgttccattggtctgtatatctgttttggtaccagtatcatgctgttttggttactgtagccttgtagtatagttcgaagtcaggtagcccacagctttgttctttttgcttaggattttcttggcaatgtgggctcttttttggttccatgtgaactttaaagtagttttttccaattctttgaagaaagtcattggtagcttgatggggatggcattgaatctataaattactttgggcagtatggccattttcactatattgattcttcctatccatgagtatgaaatgttcttccatttgtttttgtcctcttttatttcattgagcagtggtttataattctccttgaagaggcccttcacatcccttgcaagttggattcctaggtattttattctttttgtagcaattgtgaatgggagttcactcatgatttgggtctctgtctgttattggtgtataggaacgcttgtgatttttgcacattgattttgtatcctgagactttgccgaagttgcttatcagcttaaggagattttgggctcagacgatggggttttctaactatacaatcatgtaatctgcaaacagggacaatttggcttcctcttttccttattgaatacccttaatttctttctcttgcctgattgccctggccagaacttccaacactatgttgaataggagtggtgagagagggcagccttatcttgtgccggttttcaaagggaatgcttccagtttttgcccattcaggatgatattggctgtgggtttgtcataaatagctcttattattttgagatatgttgcatcgatacctagtttattgagagtttttagcatgaaaggctgttgaattttgtcaaaggccttttctgcatctattgagataagcatgtggtttttgtcattggttctgtttatgtgatggattacatttattgatttgcgtgtgttgaaccagccttgcatcccagggatgaagcctacttgatcgtggtggataagttttttgatgtgctgctggattcgatttgccagtattttactgaggattttcacatcgatgttcatcagagatattggtctaaaattctctttttttgttgtgtctctgccaggctttggtatcaggatgatgctagcctcataaaaggagttagggaggttccctctttttctgttgattggaatggtttcagaaggaatggtaccagctcctctttgtacctctggtagaattaggctgtgaatctgtctggtcctgggctttttttggttggtaagctattagttactgcctcaatttcagaccctgttattggtctattcagagattccacttcttcctggtgtagtcttgggagggcatatgtgtccaggaatttatccatttcttctagattttctagtttatttgtgtagaggtgtttatagtattctctgatggtagtttgtatttctgtgggattggtggtgatatcccctttatcatttttttattgcgtctgtatgattcctctctcttttcttctttattagtcttgctagtggtctgtcaattttgttgatcttttcaaaaaacctggattcattgattttttgaagggtttttttgtgtatctccttcagttctgctctgatctgagttatttcttgccttctgctaactttagaatttgtttgctcttgcttctctagttcttctaattgtgatgttagggtgtcgattttagatctttcctgctttctcttatgggcatctagtgctataaattttcctctgcacactactttaaatgcatcccagagattctggtacgttgtatctttgttctcattggtttcaaagaacatctttatttctgccttcatttcgttatttacccagtagtcattcaggagcaagttgttcagtttccatgtagttgtgcggttttaaatgagtttcttaatcctgagttctaatttgattgcactgtggtctgagagtttgttgtgatttctcttcttttacattttctgaggagtgctttgcttccaattatgtggtcagttttagaataagtgtgatgtggtgctgagaagaatgtatattctgttgatttggggtggagagttttgtagatgtctattaggtctgcttggtgcagagctgagttcaagtcctggatatccttgttaaccttctgtcttgtttatcagtctaatattgacagtggggtgttaaagtctcccgttattattgtgtgggagtctaagtctctttgtagatctctaaggacttgctttatgaatctgggtgcgcctgtgttgggtgcatatatatttagaatggttagctcttcttgttgaattgatccctttaccattatgtaatggccttctttgtctcttgatctttgttggtttaaagtctgttttatccgagactaggattgcaacccctgcttttcttgctttccatttgcttgatagatcttcctccatccctttattttgagcctatgtgtgtctctgcacatgagatgggtctcctgaatacagcacattgttgggacttgactctttatccaatttgccagtctgtgtcttttaattggggcatttagcccatttatatttaaggttaatattgttatgtttggatttgatcctgtcattatgatgttagctggttattttgcccgttaattgatgcagtttcttcctagcctcgatggtctttacagtttggcatgtttttgcggtggctggtaccagttgttcctttccatgtttagtgcttccttcaggagctcttgtaaggcaggcctagtggtgacaaaatctctcagcatttgcttgtctgtaaaggattttatttctccttcacttatgaagcttagtttggctggatatgagattctgggttgaaaattattttctttaagaatgttgaatatcggcccccactctcttctggcttgtaagatttctgctgagagatccgctgttagtctgatgggcttccctttgtgggtaacctgacttttctctctgcctgcccttaacattttttcctccgtttcaaccttggttaatctgacaattatgtgtcttggggttgctcttctcgaggagtatctttgtggtgttcttatatttcctgagtttgaatgttggcctgcctagctacgttggggaagttctcctggataatatcctgaagagttttttccaacttggtaccatactccctgtcactttcagctacaccaatcaaacgtaggcttggtcttgtcacatagtcccatatttcttggaggctttgtttctttttactcttttttctctaacttttcttcttgctttatttcattaatttgatcttcaatcactgatatcatttcttccagttgatcgaatcgggtattgaagcttgtgcatgcatcacgaagttcttgtgccttggttttcagctctatcaattcatttaaggtcttctctatactgtttattctagttagtcattcgtctaaccttttttcaagttttttagcttccttgtgatgggttagaacatgctcctttagcttggagaagtttgttattactgaccttctgaagcctacttctgtcaactcgtcaaagtcattctccgtccaggtttgttccattgctggcgaggagctgtgatccgttggaggagaagaggcactttggtttttagaattttcagctgttctgctctggtttctccccatctttttggttttatctacctttggtctttgatgttggtgacctacagatggggttttggtgtggatgtcctttttgttgatgttgatgctattcctttctgtttgttagttttccttctaacaatcaggtccctcagctgcaggtctgttggagtttgctggaggtccattccagaccttgtttgcctgggtatcaccagcggaggctgcagaatcacaaatattgcagaacagcaaatattgcttcctgatccttcctctggaagttttgtcccagaggggcacccgcctgtatgagttgtctgtcagtccctactgggagttgtcttccagttaggctacacagcgctcagggacccacttgaggaagcagtgtgtccattctcagagctcagtcgttgtgctgagagaaccactgctctcttcagagctgtcagacagggacgtttaagtctgcgaaagtttctgctgccttttgttcagctatgccctgtccacagaggtggagtctatagaggcagtagcccttgatgagctgtggtgggctcccccaagttcaagcttctcagccgctttgtttacctactcaagccttagcaatggcggacaccccaccgtcccccaccccattcccccgccttcctgcgaagcttcagcctcgcaggttctcaggctgctgcgctagcagtgagcaaggctccgtcggcatgggacctgccaagccaggcacaggagagaatctcctggtctgttggttgctaagaccatgggaaaagcacagtattttggcgagagtgtcctgtttttccaggtacagtctgtcacggcttcccttggctaggaaagggaaatcctctggccccttgcgcttccttcgtgaggcaatgccccgccctacttcaccttgccctccatgggctgcaccagctgtccaaccagtcccagtgagatgaaccaggaacctcaattggaaatgccaaaatcaccagtcttctgcgtcgatcacgctgggagctgcagaccggagctgttcctattcagccatcttggaacggaccagccctggataactttttaaactcatttatttagtcacctatatatgttgataacagtggtacagatagagactgtctaaaccatggaaagataactggaatctgaaatgagaaaatgtaagttcagatagtggcacaaccaagtaatagtttgtggtttttaaagcacatcaatgaaattatatttttatgcaaagtatagtaatataataataatgctaactagcccacagagttgtttatgggttaaatcaaatattatatgtgaaaagtgttttataaactgtcatatactccccaaatattagttacctgatatttttgaacttattagaggcatttactttaataattttcatttatacatatacttaaattgtataaggataaacattttaaagttattatcaattggcatgaattcttaagcataagcaatgttttaataattttgttaatgtgttaaagatcttaatgaaggataaaatattgctggactttcaagtagttaaggaatgttctgtaattggcaagggtgggaacaaaaaaatgttgacaaggtaacacatcatttttcagtacagtattggttttgacaaccttttcttgataggaagacagaaactgaagtgtcaggaattgctgtattcaccatgaaccttcctatgctctgatgaaaacatgaatatttgttataagcaaatgaaatggagctgcagctatcactatgtactctgtgggcctttaatacagtagggattcctttatagatatacatagatttaaattgaaaaaaatggtctttgctgtttgagctcagttgtttagttagcctttaaaaaaaaaaaaaatcaccagataacttatcgtaaatgttgtgtgtgtgtgtgtgtctgtatgtatatatataatttttttagtaccctcatctcctgtcaacctgtttgccagattatagactgtatcatacccatggaccttgcataactaatatctagaaagaggaagggaaggaggcagaaatggcttcctagggagaagcttttactgagaaataagccacatggctccacagccagcccataggtctttgagatatatacagcccatgcttcatcctacccctaccttgtaaatgttaatagactttattcttaaataattattgttaacagactcttttttaagaacagttttaagttcatagcaaaattgagcataagatacagagatttcccatataccccacatgtgcatagattcccccattatcaatattttagtgagtaggcccctactatattcagagcactgctagtcactaggaatgtaagtaagtaattgatgtcttggaggtgagaagaaaaggagactagtctcttgagattacaaggtcctagaaatttaacatgcaaaatctggagaagatagagagtagggtggggttgttgaaaggtttttagtagggttttccaaagtaaacatagtcaggttattttaaaaaataaaatataacttgttagcttgaaagtaggagaaaaaaatttaaaaaaataaaatttcagtgttagatatattagtcagtttactttcctatgggattccctagtccttatcgtgtaatttacatttggctagaatgtcattgcggtgagacagatgcttgtctgtcttaatctgttatatccctagtgcctaaaacagtacctgtcatggaaccagtgcttagtatatatttgggaagtgaataaaggattatagaagggggttatgacttagttcatgtgaccttttttcccccatgggacaaatatttcatgacaaatactttgacacatagtagtcctgggaataaaagataggtcaaggccctttttgcgaaggttaccttggcagacctgggcaacaactacactcttaagcacaaagtgtggctgcctgtttgttggaggtgttcccagacttcctggcaaccttccttgcccagtttgaccattgggtccttccttatagaaggtacttcctttctctttcccgagaggacactatactgtgacttcacttcagttgcctaaggtaggaaacttacaaattagactcaagaacttttcattccttcctccaatcatcagccttaacaacctccatctttcctttatatggaagcattaatttttccccgtacacaaagtattaagttgaccatacttcttatatttgatagttgtatggagtcaagaaaatatagtagtagcttgtttatgtacattttcctcctgctgtagagcacaggggttttactttacatttaccaaaagcagaaaattcctactgcagagatgggtaagaattatgccattcaataagatacgctgtctagtcccattcctaaaagtctagtcccattcctaaaaatccctaccagtcccctctccattactttctgcccccactactattgctgctctacttctgatcttgctgtcagcctcctatatgctcccagctctaactagatccggccagtttctaccagaatgatcattctgcagcatatacctggtcatgcttgctcacaggaaactggcaagagtcaagtagggcatgggctttccatggctcccttcagcccttctggctccaggctcctatttcactttctcaccgctctcctctctagcccttggaatccaaacacttaacattcctagaaagtactgtgttctctttacctgtagactttcactcttgctgatctcttcatggactattctacccctctttctcttcccttggttaaggcaagtccctccttctgcctcaatgcagaaatcactgacttcagggagtcttccctaaggtagagcaagtgcatgtctacaatgtgagacctttaaagaagctttcatctggagaagagtatctaattacaaagattaggaaaaagtatgtgcttggcaggaagagggatttgaggcaaattttatggtggctttgaaatatcctaattatttcatttaaatagtgtactaaatggaaccccaaactgaaatattcaactcataatctaatatttgacatgcattatactgtcccttatccatcagtaaaatgttctgtatctgctgcttttggtgatggtgcatcccaggagacacactgactgaaacacattaaccttctctcttgactggctcatttgattcaaataacaagttcccccataaccctacttcaaaaactagaaagtatcttactccattttcagaataccaagttgtgagaagcagcgagctattctttgtttttgttactctttgtttaccattaacctagtaatcacctcggctggaggctggagattgaagcaggggagtgggggaggaggacctgaaggagcagagggttgagaaaaaatggttagaattataggttgtaaataccagtatcgtacttaataaaatatgctaactctgatggtcaagcttaagcttttataatacaatgatttaagataattataatcaattgaattttaaagatataaaatgtgtgccaaaactctttaatatattgtcctggtaagtgtgcttttgggaatcacttctaatatgatagtccaaaatttaagtgttttatatacagagatttctgtgtgatgttcaacaagaaacttgggaaacaatcaagagctttgtgaaaattatctataaaatgacgtgttcagaaaatgttttatcatataatattaaatgttaaagcagtataaatatttatatgtattctgatcaccgtgaccaggtaaggaaatactgtaagccatgaacagaaatagaacagaagtcacaggacttgaggaacagcaaataaaataatccagttagatcagatcatatgtatatgggagaaaagattacaagggtaagttgggacagatttatggagttacttgttgccttgaataggacagtttgattaataagtaatggggagggttacaggtttttcattagctgagacatctgattagatttgaactttaggaaagcaagtctggttgtggtatataggataagttggtatgggaagagatcttgttacaggggtttagtcaagtactgatgatatgctgaactgccatgggctaattggaaaggagagaatgaatgcaagaagtgttgtagaagtagtatctataggatttgtcaaatatttcaaataaagtagacttaggagaacaaggagttgaagttggccatgaagtttctagtttgggtaactgggaaaatggtgataccatcaaaaagttgtagactgtctcatggaagaactggtctttaggtggggaaggtgactttcattaatgtcaagcgtactgaatttaaggtgctggattttggtataaatcttcaacaagtggttggcagtgaaaacatttcgtgtaagaccatggctaaagagagggggagaaaggcttttcacttgcttccaggtgatagttggagctctaggagtgaagggaagagagagcctagggagaagaagaagaggcagagccagcaaggagtgctgcagtgaggggagaaggaccaaggggcttatgggccaaaaagcattaaagggagaaagtttgtcttcttagtatcatgttcttattttagttgaatttcctattaccaaggatgcacacatttctgagtcctaaataaaattattcatacttttcatattcaaaaattcaaaaactaagttccataacctagtaagattatgggggcagagggatggaattcaccagtttttttttttctctgcttctacttcattggtagtattggttaagagttttcttcatagcttctttttcctctcccagaaattggtatttaaagcaataaagagtaaaggtcacacctgacttctcttgtctaattttataagcaggaaacacactgtgtagtttaaaaaaaattctcatagcacataaagtgatataaatgaggtatacacatttattagataatattttaaaaaatcagttcatcccaaagctagcaattactttttatttagaaattttactttaatcataatttgatttttaaggtattttaaaataaatattaaacataaaagaatgattttcagtggctgtagttcaaaactgctgtggaatagaaattagtattgtgacaccatttaagtgtccagttttaaattaaatggtgttgagtttccagctctcttagtttttattgtggaacaaaccaccccaaaacgtagtagcttaaaataaccatttatttggctcgtgactatttggctttgtcatttggatggggtttagctgggtgagtcttctgccggttaggaggggcttcctcacactgccagattggctgggagcttctgcgcctagaatgtcttcagctgtgacagctgatccctgctccatgtggttgcagcctccagcagatgagttcagatttgttcacatggtagcagtgggtaggcaagagcctctagagccggagctgaagagctcttgaggcctggacttggaaatctcacagtgtaacttttgtcagacttttggtcaaagaaattacaaggcagcccagattctaagggtgggagaatagactctgcttcttgatgggagggtggtagaaaatactgtggccagattgtcagtcagccatccagctcatattcatttgttcattttgaatactcaaatacgagtttttaactgctgaaacatcattgactgtatgtgtgtgtgtgtttcattcatcctcttttctcagtacattacccctgcaaaacaaggaggtatttgaagtaatctcactcttctgattcatctgtttgatgaaagacatgtttgtttattcagatattaaaacaacttgaaaagagagtgtaacataaataaaataaaactacagctggtttacctatacagtatttgttaagtatctttaactgtctgtttttgcctggcactggactagatgtataggaatagagaaaaagaaacatgggacatagtctttactttcaagaagtttatatgcttatagcatgggtaaaatttatacccaacaaataatttattaatgtaccaaggactatgctttaatcaaaggtagtacatagatggatatgacctagtccttttagtggaaatagatatttaaaatagttataattcaaagcatgagagaaatataaactgagtgctgttgaattagaaaaagaataggaggagacaaatgattgagtgccagcgtaagtgtttcatacaattaacacctgagaagggagacatctttgaaaccagagggtgatggcttcatacagaaaatgagtcttgaacaagactttgaagaagaggtagaatttgaataagtggagaggtaggaatcctactcaatttagaattgagttgttttcccaagaaggtaattatctaattagagtcttttcaagtggcaagtattaaagagcatgcaataacatgactatagaaagactgtagaaaacattatgctgggaagattgctgtcaatgtttttttcctctccaatggtgccaaggcttaattttgttttctttttctcttaaaacttttttagagatggggtcttgctgtgttgcccaggctggtcttgaactcctgggcacagatgatcccctcgtctcagtctcctgagtggctgggactacagccatgcaccactgtgaccaatttgattttctatcgtcagctatttgtgtactttaattggaagactgagtaaagaatggttattttataagggaaatgcacattttgtttttattgaatagtactctgtagccatgtattgattgaaaaaaaatagaaacaaataatgtgtatctctgctgacgaagaagtacaacatagacaaaagtaaggaaacccccattgagtgatgtcaactgggtactttctacaagtatatctggctttatttagggactaaaccggtagaaataattgggggaatttcctttcctaaatttgacaggtaaatttgcttttcatactttctgttttagttgcttatatttaaactattttgagaaggagaaggatcaattaaaatgtattttatttagtgctaattgaatagtaccatatttaaacttataccaatttccaaagtacttgatgtaactatatataattagtaatagaatataggaatcatgatttttattttggtaaattaaaggtagtttttctctgttaaaatgggatttaaaacacctttatgaatgaatccctttatctagtttatcattgcctttcctatgaaagtagtgatacttgactaatactgtctaacttaattgctaccatgtggtgaattctagagaattctttaggggaaatttttctactacatttattttcaatgacaagaaattgggagaatttataatagctcttatcatttcatgtattttaatatctggactatatgttcggtccaaagagaatatatcacagagtgatcataagttgaaatgagataacacatgaaagtattttgtaaactgcaaagtcctatgcaaataaatgttaggtgatactattgttctgagattagcatttgttctttcaaggtctctacagaatagtcacagttcatagcttagactctagatccacgtgttctaagatcaagtctaggttcagccccttactagctctgtaacccgggataagtttctaaacctctctatacctcagttcctctgtctgttaaaatgacataataatagtttacccacttcaaaggattgttgtggagattcaatgaatttatatatgaaagtcatttgcaacagtgtcttggcacacagtaaatgttatgtgttagctattcattactgtcattattactacatcatgtagaatagataattgctttctgatatatgctaatcatgtttttctctgtggaattcttcctttactctcctagttttgcattttcctgaaagagagagctcattgagggtgatgactgaatctcatcaatttttatgtcctcagcagcttatgatagacattcaataagtgcatggattacattatacacacatgaccacttaagagagaaatacatactatagaagaactgtagaaagggaagtagcattcagcatctgcacaatgttagtctctttctctttctggtccatcttacccttttcagcctaaaaattgcctcattttgttccttttttttctcaccgatctggcctcaagggtgccttcccagttttacctagccatctcttccccaggttgatttctttatttttttatttttgtttgagacagggtctcactctgttgccaaggctggagtgcagtggcgtgatctcggctcactgctcactgcaacctccacctctggggttcaagcgattcttatgcctcagcctccccagtagctaggactacaggtatgtgccaatatgccactatgcccggctaattttttttgtattttttggtagagatgagatttcaccatgttggccaggctggtcttggacccctggcctcaagtgattcacctgccttggcctcccaaagtgctaggattacaggtgtgagccaccatgcctggcctcccagattgatttcattcccactaccttttgtgggaaaccttcattaaccactcctgcccaagacagtctcttctgttctattatacattttatatgtgtatgtataataacattattatatatgtatattctctgctcttctttaaaggttttatcttttttattaggtgatacatgcacatagtacaaacttcacaaagtgcaaaagactatggtgaaaagtgggcctctgcctccctggaaacagttactcttaccagttccttacatatccctgtggaaatagtctctgtgttgcacagcttgcacatgtgttttaatggtagcatattggatactctgttctactttgctttgttcacataatatattttgaatattccatatcagtacatatagcactgcctcactttttaatggctatataaaatagtactataatttttaaccagtcacctgatggtgggcttagtagttattctgtggctgttaccaacatcactgccatgtgcactggtacacatacagaagtccacacaagtaggcctgtatctgtaaggtaaatactggtgggattactgagtcaaaggagacgtgaatttttagatttttactatgaaagacaaactgctctttatggggattttattaatctacaaccccatcaacaatgtatgagagcccatttttcacacacttgccaactcagtaggttattaaaccttttggtctctgccacttgtatatcccagatcaacttctaattctgcttcatattgtttgctatcctttagaatatttctgtcccacctcccttcattacagtagctctttgcaatcttagataatcttatattttcattgactttatattccttaacttccaggagagttctagtttctgatattctgttccattggcatgtacttgtcagaccaggtatcctcatttacttacatgtcatagtgctctgtaaacgtttatggattgattagcctaagtgggcaaagtccatctgtctctataattttgaataagagagagccattgcttcctaaatattttttattagtttctgcctttgtgttaattagtgtaattaacattgtcagtatctgttgctacacgtgtgaatctcagtgttcaaactcaggctctttgctaccgacttttaccttgttagcaaggcgaacacatattcatttaaaggtatcaataagattttatgacctgttttctggtagcccaggatagagtctttctgggttcactctgcagagctgggtgagttaggtgggaagaatctcaaaaaagatgccattctggggtaataggggaagctcagggacttggttgagtttaaagtatgacctcctagagctgaggcagtgagagcccggtatgtgcaggaggctttgttcatggccagactattgtgggagcctcttgaacaacaaggtgaaaagagcaaaatgggcaaggaagttgtgagccaggctgaggtttgagtggagggttcaggtacgtgttcagtaccaaaccgttggaagtcattgccagagtattaattaaattgacactttaaatagtttctaaattagggatggttgatcagatgaagagacatggtgggccagaaagcactgacttggataatctaaataatttattaagataacattttttaaatgtaggataggatcagttcactgtatacagttgcacagtttgttatgtactacataaaagcacctcactaaggaggcagagggtgactagatttcagcccgggttctaatcaccgaggcatgtacctggtatgcctggaggaaagtgtacctttttctgattcatctgctaattcaaatatttggggtaggcaagtagaggccttgttctctttgtcttatatgttgtagacttaatgtgaagaatatcctctaatctgttaaaaaaatcaatatgtaataatattttctgatccaaaaattatattgagcagtaaatgatgattggctaccatttaattctcttttataaaatgagaatagggaaaaagaaaaaaagaaattaagtatttggctttgaaagagtcgacctgtatgaaaaagaaatgttgaacatttgtacccttttttctttttaagcttttattctctgttgtgagattttcccctttgaggacactgaaagcaaaatgaatcgtgccattggaaaatgccctgtagatcttcatggggttatctgtagccagcagcgtacaggaaactagtcacattattaattgcattctctcttggccaaaggtttagctgttttaaaatgtgatttcactgcccatattgctcatatgcctaagcttctttgttactttagtaaatatatgtttgtgtggagtgatttagctcaaatttagtgtattaaatggtagtctacctaaggcacccatgtctcctctcctctcctctcctatcctctcctatcatctcatctcatctcatatcccttccactcccttccccctttcccttccccctcccctctatcctttcttctcatctttcctttcctttcctcttctctgattttctctttctctttttatttctctctttatctctttctctctctttctctctttctctctctctttctttctctttccctccctcccttccttccttccttatttccttccttccttccttccttcaactgtacagagacctggaggtcgccaggctacccattctgaaatgtgagttttgtttggctcacacagtgttgggatttgttgggtttcaaatgtgtttaggtaagagttgtgcctttctattagtcactattctgaccattcccttttgttttatatctgatccacttcaactgtctttcctgctggcattccagtttgtaattcttactttatatctggatactctgtgaacacagaattaaggcaggaaattagaaggtagaataaaatctgcttttaagaagcagtttacattaaacaaataacttttatttatagtgttaataaatgttttcaaatattataattgtatcccaatatcattcccctaagtactcttcccatttaattgctattaggctgggctgtgccttccagcaagataaataccaggttggtaggcaaaattagggaactgtatcaaggtttagaataccaagggtcaatagcaggccagtcgttggaaggcagaatatacacaaacagtaaggtcaagacaagtcataagtcagagcaagctggacagactagggaatagcagtagcatccaaggcccatgggagtaggaacatcaggtccaagcctctaagaccaggaaatccatgagcattaaaggaatgagatcagaattggcaggcaaggaggctgagtcatgggggctcacggtctcaacaaggaaatgggtcactggcggggtcagtacaggaccctacgtgaaagaaaggagtttgccacagaccaaccccttttgcctctgcttagaattttttaaaattaatagactttattttttagaccgtttttaggttaacagaatggaacagatagtgcagagagttcccagataccaccttctcccccaatcccctacacaccagtttcccctattttcctatttttaatattgtacatttgaatgatatatttgttgcaattgatgaaccaatattgatacactattattgagttaagcccattttttacattaggtttatgctgtgtatatttttatggggtgggtgttcgtgtattaacatttatattacataaaacttactattttgaccattttaggtgtgctgctcagtgagattaggtacgttcacactgatgtgcaaccatcaccattagccacctccagaactttttcagtaaccctgatggaaactgtacccattaaacagtaattccccatgtccctaccctcacctttggtaaccactttattttattttattttattttattttatttattattattattatactttaagttttagggaacatgtgcacaatgtgcaggttagttacatatgtatacatgtgccatgctggtgcgctgcacccactaactcgtcatctagcattagttatatctcccagtgctatccctcccccctccccctaccccacaacagtccccagagtgtgatgttccccttcctgtgtccatgtgttctcattgttcaattcccacctatgagtgagaatatgcggtgtttggttttttgttcttgcgatagtttactgagaatgatgatttccaatttcatccatgtccctacaaaggacatgaactcatcattttttatggctgcatagtattccatggtgtatatatgccacattttcttaatccagtctatcattgttggacatttgggttggttccaagtctttgctattgtgaataatgctgcaataaacatacgtgtgcatgggtctttatagcagcatgatttatagtcctttgggtatatacccagtaatgggatggctgggtcaaatggtatttctagttctagatccctgaggaatcgcctatgtcctgaatggtaatgcctaggttttcttctagggtttttatggttttaggtctaacgtttaagtctttaatccatcttgaattgatttttgtataaggtgtaaggaagggatccagtttcagctttctacatatgggtagccagttttcccagcaccatttattaaatcgggttctatctctatgtatttgactattctgggtacctcatgtaagtggcattgtacaatatttgtgcgtttatcacttgaacccaggagttcaacaccagcttgggcaacataacgagaccctgtctctacaagaattgtgtgttggcacacacctattgtcctagttacttgggatcacttgagcctaggaggtcttggctgcagtgagccatgattgtgccactgcactccagcctgggcagtagagcaagactatatctgtctcttaaaacaaacaaacaaaaaattgtccttttgtgtctggcatatttcacttcccacagtggctttaatgttcacctatgttgtagcatgtattactatttcattctcttttaaggctgaatattccattgtatgtaccacattttgttgatccacttatctgtcaatggacatttgcgttttcaccttttggatataatgctgctgtgagcatcagtgtacatgtatctgtttgagtttctgctttcagttcttttttgtgtatatatcagaagtggaatagctgaatcaaatgatctgtgggtccgggcgcgatggctcatgcctgtaatcccagcactttggaaggccgaggcaggcagattacctgaggtcaggagttcaagaccagcctgaccaacatggagaaacccgctttctactaaaaatacaaacttagctgggtgtggtggcacatgcctgtaatcccagctacgtactgaggcaggagaattgcttgaacctgggaggcggaggttgcggtgatccgagattgcaccattgcactccagcctgggcaacaagagcgaggctgtgtgtcaaaaaaaaaaaaaaaatggtctatgggttttgggcaaatgcacaatgtcatgtgtccactatacagaatagtttcactgtctgaaaaatctcctgcttcaaccattcttcactctctcacctttgcctctgcttaggttttaatgttctttttgtagacatttaaatactgtttatactccaacctggaattttcgggtaaagacgagttagtgaaatcagtgatcaagggaaagtaagatgttctggtaaattatttatagtcccttaggctttgagattttgaaagttacttacacagttagcgtacaggtaacaaacagagctttagaatgcattggcttcaaataggatgatttgtgtggatgcagttatatattgcatccatttattccacaaagatttattaagcacctatactatatgccaagccctgtgctagatgctttcaataggaaataaagattccataagataagttagactattttaggagtttccacctttttaccaccaagctacccctttgatagttgttccctaggaggcatgtgttttgaaagatcctgtctattacatattatgcttgtgctaggctttctcagaatattgaaaatagcttttgaatctccactgtaattttcagggagtcctagaggtctagagatcttcataagaaaactgatcacttttttaaaaaattttatttatttatttatttatttattttttatttatttattttgagatggagtcttgctgtgtcacccaggctgaagtgcagtggcatgatctcagctcactgcaagctctgcctcccaggttcatgccattctcctgtctcagcctcccgagtagctgggactacgggcacctaccgccacacatggctaattttgtttttttgtatttttaatagagacagggtttcactgtgttagccaggatggtctgtatctcctgacctcgtgatccacctgccttggcctcccaaagtgctgggattacaggcgtgagccaccgcgcctggccctgatcactttttaaattcagagcatgagtcttcgattaggctggtttgtgtgactgtcactgtgctcagtcctgttattacagctgtgctgaggtacttagtgtggctgttttccagacttgacttgctcaaattaccatttctctatcttctccagttgcttgctgacccagccttttccactatacttagtggcagtgaccatctaaatatgaaaaaaaaaaaaaccaaaacaaaaaccgttgtactaggatagaaaataaagagacaagaagggcaagaaggctcaggtatttgtggtcattaaagcagaagtctctacgctattttaattgttactgtcatatgagcctcctgataatttgtttattcgtgtttgtacatattctgcataatatcagtatgtgcattattagtgaaacctaatttttctcctttttaaaataaaagttaattataaatagaagttctgagattttgcatgtactctgagctgcatgcatcccactttagaaacctgtactgagaaagcagactgatattttttactgaccaaaatactaaccaccatgtctactgtagcttagattattctacagataatgctgaggattctgacatacaaacagacaggtaggtttaattagggaaaagttctagaagcaattccccaagtcactgtgctattcaaatataaaaactccacatgcatttgggataaaaatagcatattctgaaaaattgagggtttttttttttttttgagacagagtcttgctctgtcgctcagactggagtgcagtggcacgatcttggctcactgcaacctccgcatcttgggttcaagcaattctcatgcctcagcctcccgagtagctgtgattacaggcacctgccaccatgcctagctaatttttgtatttttagtagacgtggggtttcgccatgttggccaggctggtcttgaactcctgacctcaggtgatccacccgcctcagccttccaaagtgctaggattataggtgtgagccactgcgcccggccaaaagttgagatttgtaaaaaataaattagtatagagagtttcagttttactagataaagttttagagatctgtttcgcaacaacatgaataaacttgacactaatgaaccatacatttaaaaatggttaaggtgttaaattttatgttacgtgttttaaacacaataaaacaatcagttagatattggtgatttatcccctgtaaccaatattttaacatctactatataaggactccatttggtctctgcagaccaaattttctgcagtttttgctaggtactttaagcattttagtcccctgtggttacattatcagaaaaatgtgagtgcttgtgattcttaatatagagccagataaaatccctgaacaccagtccactaaatctactttaatgggataaacttttaaatgaaccattaataatatactccacatatttgctatttggggtctggggaggcagatagacagaaagagatggaagaaaagcctgagttgactttcgtactttcagtgttccaaagcctggatataaatgaaagatgagcatttctacttaatttatctggctggattcctgtgcctaatggctgcatatataccataaacactgtgaagaagcaaccatggaaacacttgttttcttgttgggctaaatttactctggattgaatattaacacagtgcctggcagtactttaaaagcaaaaatagcttaagtgtgattcactctgagtcatttactgctgctgctgctgctgctatactgcctagagcttgacattgaacaagttggcagcctgtattgctacattttttctaggaactctgaacacatttcattcttgtgaattcgcttgtgcaacgatattaaatagagtaatatgtttattttgtttcaaagtcaaatgaatttgagaatggtgaaactgaattatttttcttgggctttctggaaaagctagattctcagaattctcccgtggttataagacttactctattttataaagaattaataaaatgtcactgaagttttgttttagacactttgggcttcgctgattgaaaacaccacaccaactgaaaaatcactgtgaaaaagaacctggtagtactgtcaatatcaagtaggattcattaattttctgacattactggacaagatggttcgtgccattcagaaagctctttttctttcttcttctttcctaatacagtgaggcatacaacgtagcctgccttatggttaagttgggtgtatgacttgtaaacttccctcttgctattaaagattatataatgggaagttcattggttttgaaaggcagaccaaacccacccatgggatttctattggctttttagatgtattgcatttctctgagtaaacccatgtggctgagaaatagtgagtagcttgttggctgactgtgggaaaacctatgaaggatcagttgatctcatttgggcaggagtcagaaatggctgagaatctaaaactatatatatgaggatggttttctcttgatgttgcaatctttattttaacatgtttttgtgtttagcttctggagttgcctaacagtataatttcaaatgaggtttagtttcagctgtttaattttaaactgtagggaacatgattaaaaaaaaattaaggcattatcatttgccttagaattttaatggtttgtatagaaagagttttcctgtgacaacctaaaacaaaaatgagcctaacctaattcttgatattatttgttttaccataaaattcttacattagaacatgtaactctgtcagagaatttcaacatagttgcataaattgtgtttcatattacaacttgttctctgcttgacttcattgaaagtaataaaatgactctttcagaaggatctggtgagttaacatcattatttaaaaaaaaaaaaaagtaaagaacttactcataatgtatcctgtgttgctaagttttcaaagttagctatctcagccacacccaaaagccctttcagaagattgaaatccacttattcatttatgctggcttagaattttcttcctagtaagatctgagatcgatataaattttccatgaaatatatgatgaatgcaagaaaaactaacatttggaatttgagttgctgccaagtcttgtgtgtaatatatagttctttattctgtggttaaagagatttcttatagcagggctttctctaacttgggccctgtgggtgctaaaaatatctcgaaggtattttttatgttccaaagggatactatcacccttcctcagagctagaatataggataccagtcctgcagtagcattccccatatcatggtcatacccaccctctactgctacatttccaaggcatataaatgagtttttcatatggcttgaaaattagctcaacaaagtttaaataaccaaccatgtcaggttgtaaactaaaggggatagtctaaatgagtctcagcatagcccagtacccactgtgttattaatgcctttacatagatgtatctcttttattgagacaagatctcactttgtcacccatgctgaagtgcagtgacgcaatcatggctcacttcagcctcaacttccctcactcaggtgatcctcccacctcagacctgagtagctgggattacagttgtgtaccaccatgcctggctaagttttgtattttttgtagacacagggttttgccatgttgcccaggctggtcttgaactcctgggctcaagcagtccacctgcctcagcttcccaaagttctgggattacaggcatgagccactgtgcccagccagatgtgtcttatccatagacatattataggttgcgtatcacttacgtgaaatgcttgaaaccaaaaagtgtttcagacttcaggttttggaatatttgtatatacataatgaaatatattagggataagacccaagcctaaatgcagcattcatttatgtttcatatgtagcttacacacatagcctgaaggtaattttatacaatgtttttaataatgtcgtgcatgaaacaaagttttgactgcattttgactgcaactaggtgtggaattttccacatgtggcaatgtgtcagtattcagaaagttttggattttgaagcatttcagattttgggattaaggatgttcaacctataaatgagatgatgtgaaagtcttcacacagggcctagcataaagtagacactcaataaaaaagctcattaaatcagaatttatattataaatattcaccttatttggcctggaagttttctttctttctttttatttatatgtatactcatttgtcaaacttgtattatatgccagaaactataggatatttgagacaaattaataaaccttcaagaattacattcttaacttgaaaaagcaggcatgcaaattactaaatatattaatcatatgctttttaaaaagattaggtataaggatgtcattgccttaaagtaggaacgattttttaaaattttttaattgagaaataataattatatatatttatggaatacagcgtgttttgatatatgtataccttgcagaataattaaatcaagttaattgacatatctgtcacctcatttccttttttgtggtgaaaacttttgaaatctcctctaagtaattttgaagtatacaaatacattattaataatgtgattttcgtgctgtgcaatagatcactaaaacttactcctcccgtctaactgaaacattgtagtttggccaacatctccacattttcccaaccccttcccccttcccccaacctctggtaaccaccatgctattctcaaagtctatgaattagcctgttttagattccacgtgtaagtgagatcatacagtattggtctttatgtgcctggcttatttcacctagcatagtgccctccaggttcatccatgttgttgcaaatgacagaatttctttttaaaggctagctagtattccattgtatatgtatataccacattttttaaatctgttcatcgatgagagactcttagaggcggggtgcagtggcacgacctgtaatcccagctctttgggaggctgaggtgggtggattgcttgagctccggagttcaagaccagcctaggcaacacggcaaaaccctgtccctacaaaaggaaaagaaatagccaggtgtggtggtgtgtgcctgtattcccagctacccaggaggctgaggtgggaggatcgtttgagccctgaaggtcaaggctgtggtgagccaagattatgccagtgcactccagcctgggcaacagagtgagaccctgtctcaaaaataaaataaaataaaataaaataagcacggtggctcacacctgtaataccagcactttgagaggctgaggcaggcagctcaggagtttgagaccaacctgagcaacatggtgaaatcccatctgtacaaaaaatacaaaaaaattagccagacatggtggtacacacctgtggtcccagctacttggcaggctgaggtaggaggattgcttgaaccccagaagcagaggttgctatgagtcaagattgcaccactgcactccagcctgggcaacagagcaagaccctgtcccaacaaaatcaaaaataaaataaaataaaagtagacactcaggttgcttccatatcttgactattgcgaataatgctgcagtgaacgtgggagtgcagaaatctctttgacataccaatttcatttcatttgtatgtatacccagaagtgggatcatatggtagctctatttgtagttttttgaggaacttccatactgtttttcataatagctgtagtaatttacattcccacgaacaatgtaccagggttgccttttctccacatccaaaccaatacttgtcttttgtctttttgctaatagccattctaacagatgtgaagtgattatctcttcgtgattttaatttgcatttcccaggtgtctggagaagttgagcattttttccatatatttcttggccacttatgtgtctttcttttgagaaatgtgtgttcaggtcctttgcctttttttttttttttttttttttgagtcagggtcttgcgctgtcacgcaggctggagtatagtggcgcaatcatagctccactatgcagccttgatgcagaaatcatgcagccttgatcttcctggttcaagagattctcccactgtagcctccctggtagctgggactacaggcacacaaaaccatgcctggctaatttttttaaatttttagtagagaggaggtctggctgttttcaggctggtcttaaactgctgggctcaagcagtcctcttgcctcagcctcccaaagtgctgggattacaggcataagccaccatgcccagtcctttgcccattttaaaatcaggttatttgttttcttgctatttagttgtttgagttccttatgtattttggatgttagctcattatcacatgtatgcttcgcaaatttcctcccaacccgtgaattgtcttttcattctgttgtttcctttactatgcagaagcgttttagtttgatgcaatccatttgtctattttttttattgcctgtgctgttggggtcatatttaggaaattattgctcagcccaatgtcgtggagctattcctagttttcttcaagtagttttacagtttcaggtcttaaatacttaagtctttaatccattttgagttcatttttgcatatattgtgagttaacagtctaatttcattcttctgcatgtgtatctacagttttcccaacattatttattgaagagatgttctttccccattgtgtgctcttggcacatttgtcaaaaatcagttgaacataaattcatagatttatttctgggctttctattctgttccagtggttggtgagtggtaacaattttaactaatatcgactgttgacctttgagtacttcctatgtacccagctctatttaaggtgcaataaggtaggtagatagtgttatccccattttacagaggaggatattgaggctcataagaggttgagcaatttgccaaactttatatttacaattcaaactcaggaaatcaagctgcagagtccatgccctttactattacgtaaactgcctcttgttgattgactttattgaggaaaaagaaaaaatcttagaagttggaggaaatgggaagtcagtacagcaatgataatgtgatctgttttgtaggacattagattttttcaaattagtgattattttggagtacttttgctaaagtctgtgtttctaaaacaaagtgccttcatccagtgggctaaatctgagaataatttatcacatatttggcatatctttcttaggctatatgtgctaatccctaacatgagctgagtttgagaacttaatgtttttacatattacctcagagactgaaatcagttcttaaaccagtattgggttttgccattcagagaggcactgtggggccatgccaagaaacaaattagctaaaagtaaggctttccttcagtcgacagcagtgggtctcctttcatcttgtggctcttttaagctctctaacaacctctttctgtcctttcgactccattcacctcaaacccaacagttcttttttgtagtcaacactgctaaatagttattcagagccctgcagctctcatttcattcttggctttgtctaagttcctgagagagctgcaaaaagaggttgaagaagtgaaaatcatcagctcaccctgtttgcatatcctgcagtttgccagcaccccctgagaaagttcaaagtctaagggtacagtgagcagagaagcctctccagggagattcccaatagcttgtttgtttcacattgtgctctggggtatatttgtttttattcaggaaggtattgcctttttatttcttgatatattttataagaaaatgttttctcttaacatgagagcaaattatacttatttgctgaacaaagcaaagctatctgcaaggacattttagttttcacttcaagcatcattgcttttggcaattgtagacaaattatcgtactgtttgatgaggtgtaaaataacacgctttaactggagaatgaacacatttccagatacaatattatcgttctcttctttttcaagtaataatttccaaaagatgaattttaatggactttttgccatttaaccaaagtgaatccttgagtctctgaagttgcccccacttagcacctgcgtatataacacttaacaattatttacacttttgattaaattcaacctttatgtctgtttgcaaaaaagaatacatacaattttcttcacaaaaaccccagtgtcagacattttgttttgatctttttcttggcatattaaactgacattgggcaccaagatgatgaattatggaaatactgcattcctcccagagggcctcatgactttaactaaatattctcatggcccagtcattgtgtagatttgcttttaaacatgtccagtcttggcattttaaaataacattttagaaattcaccaggaaaggaaggtgaccgtacagttatcagatgataaattctaatcatgggacattcgcgtgggtcgtttgtaattgaagacagtgcatcctttgtaactgaagctagtgcaaatgaggacaggagtggagggacagaaagcggagaggtgtacagctgctcttcttgcactgtacccctcatatctgcagccgggatcagtcaagatctcattcgtgatgcttgggtgccttgggggcttgggaagccagctcaggccttgtgatccactcggattagtgttgtctggggttctcactttctgactcctggaggacgaaacgccacttgtctgagagggagtgggagtgattcttgagaatgaaaacatgatttgggtagtgaagaggtggagaggagaggcagaggggatgtggaaaagaggtagaagcagggaagtaagcatgaataaagagtaaattgggcagggagaacaaggaggaagacactttcttccccttactcctccctgtttgacagtctggctatttctgctttctcccttagtttcctcttttctctccccgtttcatggcactgctctccaaaacttgttctggcaaccctctgcctcatctttttgtgtccttccccaacccctatctccacccaccagcccagttcacttcctttagttgccccagccccctttgcctagggactcaccagtgagtgccacattcacagccatgtctggtgcagtctgaaacacctgaggccactcagggtctgtattagaattaacctttactaacaggtttaaccagacttttcaggttccttttaagtcagaatgaacccctgccttgaccttgcccatcctcaaattggggggcagcctccagatccacaagacatgagaagcaggagcaggcctgccacgtccctgacatggcagtagagattttatgaatggtagctcggtgtctccatcagtggtagctgatggtagcttagtgtctccatcagtccttcagatagcagtgagaagatgtgggcaacagcagtgtccctgacttgtcagtagcgtgactgcagctcagagagcaagtcatgccaaccagggccttcccctccagagccactgctttgctgccttaccgaataacgaatcaaatgtttctttcctttactttctgtttagaattaaggacaacttttattagcatctttgtctaagctatagcattaactcccagtttttaattacatcatcttaattgcaaatgtattgcaattcatattaaaaatcaggaagccttgtactttgctaataaactctggtgtttgcaaatctgattaagctctaattagaattcctttatattcaatctgtttcgaattacttttctgactataaaaatgtgtatattgtaaaagattcaggtaatatagagggcaaaataaaaatcacctgtaatcccgttacccagagataaccacataataacattttgtggtttcttttagtcttttttttctgtaaactatatattcgcaaaactgagatcagtttagtgtcatttttttagtcagtatagtgtgagctcattaaatatttgaaaaacatgattttaaattgatttctaatatttcatgttatgcatgtgccattgatttattcctctttgaatcattaccctctattactgttacatgcactggttgtctttcagtggatagcagttgatattgtcaatttttaaagtcagtttgatagttaaaaaatagtatcttatactatgtattgagtcttaactatcaaaattgcctaatttttagatcatttcttgttacttttatttatgaattataaagattaaataaaattatggtatatttttcaggtaaaaattatttcaaaagttgaaataagtggtgtttgttttggtaaaattttacttctttctaaagtgttttgatgcatttattcattcagtcagcagatatttattcaattccttccagtacaaggtgttaattggttagaataaaagaagaaaagtatgctttctgccttctagaagcttacaattcagtgatggtaacatatgtaaatatgtgataatgtaacacaaagaaataaatattaaaataaagctgcaagctgggtgctgagaaaacacaaaaggaaagtgatgaattttgaccagcagaatcaagggaagacttcctggaagagctgacatttgagctgagccttgaagcatggatttaatttcactggggaaggcagtacagggcatttgaggctgagagtatagtacattcagagccaaagagggctgagagcatatgtcatatttgagaaaagtgaatgtcccagagagtctggtgtgttacatgccatatggtggtcaagtgtaaagggggtaaggcagagagtggttgtagccagtgaacctacagcaagataatcaattcatacgtgcctggctctgtgctaagctccttctcataagtagcttagctcattgaattcacgttacaatcctgtgaactatgtatgtggccactcacagacggaagtagaaactcagaaagcctgagtgattccctctaagttacaaagcttataagagacagaaccagtcctgaagtccattccttttttcactataccagattgaggtaagatgatagccttgaaaactgttagggtgttgggactattttgtatgtgttgctgtttgtttgtgtgtttatttttattcagtgctagcatatgattaatgaagatacttctagtggtagaatgaaggatgatgagtcagaaaaaaatgttgcaggaagcaagacaagatagaagaccacaacagaagtccaagcaagacatggagaacctgaactactgcagtgataatggaaatgggaaagaaaagagagatgcaagagactgggagaaataatctaagcacttagtagatcgatgaactgaaagcagtgaaggcaacctatgttacattagattcgtagtctcaacttttttttaaatcacacatccttaatagtaaaatatttttgagcatgtatcccatacaaaatttttaatattttaacctcctttccagtggattttcttgtgacccattttagagagcactggaattatttaagaataatgagggaagggattgccaggaagaaagggtggaagagaatctgagtttggtttgggtcatactgagtttaagatagctaaagaagtaccgacatttgaagatgcttcatacaaagttggaagtggtattaaagattttaggaaataaaatgacaccaagcttatgttctagatgaaattcagtcttattctcaaaatagagtctggtttccccagttctactttgtgtataaggataattatggattaaaaagccaggagtctgttttatattatttttagctacatatctttagttgattgttttagtgttttattatttgatagatgataaatgatgacttatcatttgataaatttttaaaatgtttaattttattttacctttattttatagaatttttgagggaagaaatacttaggattgttaactgtagaataaaccatatagtctcagacagaagcattaattatatattttaaaaatttaattttcaagatctgtaaatatttagttgagaatcaaatgataaaacactaaaacgattttagttttaattttgaaaatgttaaagaaaactcttaaaatagatcttttgtgtagcatataacacaaatatctttttgaaaaccttgcagattgtatgtagttcattgacttattcagatttctttggaacattcagagttatcaagcctaaacgtgtcttccagacaaagagattcatccagatatcagatatctttacaaaaggctcatgcttttcagtaactttttcaaaatgtcattcttatttcctcctggccaaccctctcttactgaactaataccctataaagccttacccagaaccctttcaatttaacaaggccctacaattgtatgattaaagacacaagggctgattggtgttttgggtttggttcaatttcatttgatttcaattaagaatatgattttttaaaaaccttcagccaccaaaatcattattgatgttcaaagcgtgaacatcccttggggaagtgggaatgagaaacagctgtagttcctctgtatctcatgaaatccaattaactttcttccttttgtctcttttctgttcagtttcaacactgttcagtatcttcagtgaatttttactcaacaccagatgaatagtagtactattgtaagctaatcgtatgccaatgaggaaaaacaccttttcttttttattacttaatggataaaaggtacaaagaaattaccagtctaggtcaagttcacaaactgggcaaaatagatttgcaaaacaaatacctaaaaatggaaaacattcctaatggaggaaatggcaaagaaaaatcatcttcaagattttgcccctgtctttcttagacagcagggggcagcagcatgagatactagtacaggtggacaggtcagggtttgcttactcttcactgaactctacgtagtaggtacaactgccttggatcaaaaacaatttttagagaccctgatagaggattaatgcattaaacaaaatcacaatatagattggtggttgattaaaaattctagtatctgattttctatctaatatatattattctggtttcttactggcaagcctttattttacagaatttttgagagaagaaatacttaggactgttaactgtagaataaaccttacagtcctagaaagaagcattaattatatgatatattagtaaaagatgcttatagttgttttacaggtagcagtagggtgacctaatacacagaaagtgctgtgccacataatgaggattcagtagatgtgattaaatggttgctgacatcccttcaagacaatgacttgtcttcatagctcatcagtgagttcacagtctattgttcctttttatttggccagtgtaaaatagcagttattgcaagaacaaagggattaaagcatctgaagacctttgtttgagttctgccactttagtagtgatacatctcagagatcaacctctttaatgcctgtctttgttccctggaacagagtttgtgtttccttttgtgttacaacagaactctggtcattcctaccatagcacttttgcacactatagattgcaacccacagtattttacttaaaagattctgaaaaagtggattagaaaacaccagtgtgtatcatgcataggaagaatactgtttcatgaaattttttttcacttaaacatacagttgtatatactgggttatgataaaaatatatatatatttcttgctgcaggtcatagtaaaaggaatttgggaaaacacttaactgtagcatggatgacatcatcaggtagttatcagtttataaatctgttctctctaccatgcacctcttgaaagaaggaacacattttctttatctctttctttttaacacttaagacaggtctgcctggtacatggtagtattcagtatatgctggcatactgaataaataaattaattaatgaaatgaaagtcacctgactcctctgaacctcgtgtttctttttcataaattagaatatcacccactgtatctcacagtatcatcttgaacatcagttgagatgatgaacatgaaagtgctgatgccgggcgcagtggctcatgcctataatcccagcactttgggaggctgaggccggtggatcacctgagttgggagttcgaggctagcctgaccaacatggagaaatcccgtctgtactaaaaatacaaaaaaatcagccggatgtggtggtgcatgcctgtaatcgcagctactcgggaggctgaggcaggagaatcgcttgaacccaggaggcggaggttgtggtgagccgagatcgtgccattgcattccagcctgggcaacaagagtgaaactccgtctcaaaaaaaaaaagaaagaaagaaagtactttctgtaagcactgtgcacatgataagaattattgtctggcatagtttttgttattgttgagcaaataagcttcaggtgcttttagaatcttaactcagtattttaaaggtgacacatttattaccatactattaatagtactgtaatgtttctttttaggtgtagagttaggagacaatcttgaaaaattaggtaagaaggaaattatgatggaaaatttcaaacatatataaagtaggcccagtagaatgttctgcgtactcatccccaccttcaacattgggcaactcatagccaattttgtttcatttctacactctcacctcccctttcttatgttatcgtaaagccaacatgtatttattttcttcttcttgtttttttaacctttttggatatgtagaaatacttttaatattcttttaaaaatctaattataagtactaaaaaagatagttggtagttgagactaaaggactgttatgtgaatgagttattctctgacaggaactagcaggtaaacaggatattttatttctcaagattttcatatgatggtgaccaactgcattgcaaaagaatggtcacattccagggttgtaactagttctggaggcttagttacgcaattgccggctctgtcatcttctacagggatgtgaccttacggaaaagtaaggaatctgaagcgtggcagatcactttgaagcttgcccagtttttgcatgttatcatgtaatagtgctaaaactttttgtcctccagctaggcaacataggtatgtaatttagactttgggaatactgtagagctgtgataaaccctgctttaagctacattctgggatcgtaacatgtaatttagaagtcaaaatccacttagaagaaaagaatttttaaagcacggtaaatcagaaccatttttgtgattaatttttattgatctttttaaatttttcataattttatgttctggttctcataagaacaaatacaaataattttaaaccttaaagatgtttaaatctgttaaatattttatttatgtaggatttttattccttaaagtcacatgtggagttttttatttttaacaaggtattagtactattaggtaatactaatatgcaataaattgaatatatagtaattttgtatgtctcaattattttaaggtttttatgcatgcttgaatttttttccgaaatgaaatgaatgtaaatgcacttttgttttaaaatattccaagacatctttgtattaatacaaggaagtttatgagttggggcagggaaaacagagatggaggagatgaaactcgtgataagattgtcataactcccaaatatattgtaatcacagatctaggttggtttctgtcagagacatcaccattccaccagtctcccttcctggaaacctagaaatcttcactttttccgctgtcactttctacatctaatgaatagatccctattgattatttatttagaaaaatctctgaccgggcatggtggctcatgcctgtaatcccagcactttgggaggctgaggcaggcggatcatgaagtcaggagatcgagaccatcctggctaacatggtgaaaccctgtctctactaaaaaaaaaaaaaaaaaaaaaatacaaaaaattagtcgggtatggtgtcaggcgcctgtagtcccagctactcgagaggctgaagcaggagaatggcgtgaacccaggaggcagaggttgcagtgagccgagatcctgccactgctctccagcctgggcgacagagcgagactccgtctcaaaaaaaaaaatctctggcctttatcttttccaggtccttgaccaggctataagttctgatttttgtcaacattcatctagactaatagcagttgagaagaaatgaacaaatacattttggccataccattttatgtatatttaatccttacagtaatcttgtgagttaagacagttatctgtatttttcagattgtgaaaactaggcaggctttttcaaatatattaccctgcaaaggtatcttcttgctctgagtctttcttgctctgaatctttcttgctctgtaatacatttcatacaagaatgccaggataatctccctaaagtgtaactttattataataacttaataaaacctgtaattactggcaaattaccagggattttcacatgttttgtctcattctatacaaactaccccatgaggtttatattatctcatatacaccttgtaaaatgacctgtaatgacttttctttcccatcaaaccagttataaactcttaatgttgatgatgttccacattttctgctgtggctttgttatgccctttcaatcatctctctcaatgtaaacttggagctagctttagccagcttccttatggccctcttcagataccatttttatttcttcccaaaggtctactcaaaacacaactcttgtccgcctaatccccaccccatcccccgccacctctgtcctctaatttaaacactgccagtcctacagagcccatttcaagtcctggcttttaccaaaaaacttttccctggccaggcgtggtggctcaagcaacctagcactttgggaggctgaggcgggcagatcacttgaggccaggagttcgagaccagcctggccaacatggtgaaaacccacctctactaaaaatacaaaaattggtgtgttggcacacgcctgtaatcccagctactcgggaggctgaggcgggagaatcacttgaacctgggaggcagaggttgcagtgagccaaggtcgtgccactgcactccagcctgagcaacagagtgagactccatctcaattaaaaaaaaaaaaaaggaaacctaaaagcttttcccaagagtttatatattcctgcatttttttcttcttgatttccattatcatatctatttgcccttgagcatatatttcttaatatgttttcttcctaactacaaaagttatatatgcttgtggcaaaaatattatataggatatttgaaagtgaaaagataactcctctgaccccaatcccagtttgtagcatatgtgtcatttttctgtgcataagcaagaatatgcatagccatgcatacacccacacctgtgtacacgagaggttatatatagatgtatatatagatacatggagttatattttatacacatatacaattctatgtcatttgtttttacttcaaagtatattggaaatctttccatgtcagtgaatacaaagaattgtgtttaaatatacctttttatttcctcaaattgtttcatgtcaaattgttttattcatacacatcttatcttcctttggaaaagaaaatggaaagtcctcaagagcaggaatggttacatactcattctcttttccattccattattctctactcttggtgcatttattgcatatttcactatttttgctgtgggaaataaaagatgcttgccttctaatccctaaggagttatgacctagtaggtaagagtccacattttacatataatgttaacgcaggaagaaattgagaggcaacacagatttctattcctggaaatatggcagttaggttatttgaacaatcttcttgctgaaaaataattgaaactgttgagtatgtataagaaaacatcctcagagcagcaaagggctgaaaagagaaggaattaaaggctaaagtctgaaggcaagtgaaaattcagaaagaagtggagaactgaaactttttgcgcttaacgtagaattcagcacaatgatttggaggtggtgaggtcagggagtttctagggtgctcagaagtttctagttatagacctggtggtagctgtacgggataattattttctaaatttaaagtatgtattttgtgcacttttctatgtacatgttataatttacaacaaaggattaaatgtaaaaggacgagttgcaaaactatatatatatatcatatgatcccatacatgtgtatttcatgtaaatgagtatgtgtgtgtgtgttatgtaaataggggtcttaatatatacattttacataataagtatataaatttatgtgtatatataaatgtgtttatgttgggaatggaaatgtttgcatatgtgtgtttcatatacttagaaaaagacctggaggtactcactaaactactgactgaggccatctctgagagacaggaagggcatggggaaggaacgagaaaggaacttagactttttgctttataccactcaaattaaatttttaaacaattgtcatcatttaatgtgttttaaaatcagatttctaaaaagatttgactaacatctctgcccactgatagaaaagtactccctctaccatgctctataccacttggtacactatctttcttttctttctttcttttttttttttctgatcttgctcctttgctagactcttaaaaggaacaagacctgtcacgtttatttttcttgtacctactaaatactggtacatagtagagggtctataaatactagtgaaaactgaatgagtaaatgtaccttaagtagaacaaagggctgtaggcactcagtagttatacatttcctctgaggctcttgttacattttttaatattcttctgtacctggcacagcagtgaacataaagttggcacagtaaatacaggttgatttgaatttaaacaacactttgtggaactgtaggcaaatgtggagtccaccatgtggtgcccctcttgatcccaggcagcagggacatgaaattaccccctgaaaagtaaactgagaagtgaacacctaatagattaaggtcaagagaggcaacataatcttaagagacataaagactctttggggagtaaggtttttactataacctaatcgagggcattgacatcttaaacacactcacacagtctccatcagaatagcagtttttctgtctctaaaacagagaaaaagtaaagctattaatgtcactgttacggttcctaacaaagcactgtcagatcaacaacacctgccagattgaggcaagcattcagtccacctggcagatgtctaacccctgtggcactggaatcctacataattaactccacttgctgtgcttccacacacaccaagcttccctctggaaactgccttttcaaggagataattcactatcaggctgatagagtaattcagttatgccctattctgttgttcactgtgaattaataaagtcacattctttttttctcagtacatcagtgtcttgtgagttttgttagcataaatctgcattcctgagtccagtcagtgagaccgggtatcagagtctgcaaggcttatcagggtaaatactaccttgtggccatctgttggcacagactgctggattccccaggtgatgcccatctgcatcgttttgtgccatgtttcctttccattccacactggagttctcagaagttattaagaactccctaataatgtgcacattccagttagagagtactaagctatgttaccccatgacagttgacctcttctgggtgaatattatctgattgattttgcaaattccacacctgtatggatgaagagaatatatattgtagatgctagatcatgaggactcccaacacctcatttctagtcctggcttcacagcctcttctggtcctcatctcactatcagcattgatcctggcatcatattcaagtcccctcctaacccgggtctctcttgagacagtgagaactaaagaagatggaagacacaatgatttcaacaagattaaggataaggatgcaagtagagcaggcagggaacgaggttatagaaactttttattccatttccatctgtctctctttcctcacaacagtcccaatagcatttcaaagggtttcaagttccatgtaagttatagaaaaaaataaagcacaagttctctgtgacatgttcagcttatctatgaatataacggaactgaaaccatatttcaataaattattaacagcaatcccttgccaagaaggatatcagcacagataacagggcaaatccattataactcttaagcaaatcctggaattttaaaaaaattgaatagtgtatcaaataagtgcactgttagctgggacttcattaaacagcattttttttcctttctttcctgttcctccccctttcccaccagcttccagccagaataattgataactaaatctcaccatgaatttgttgggaatttacccacaatagttctcaatttattttaagatttaaaataatatatttttaaatagtagattaagactttacagaaatttcagataggataatacagaaccttgaaaagacttattttttacaaacttccttaaaaattcttaattgttctaacagtcacagttttgtttatgtatacaattggagttctgcagtaagacactgtggggttattagtacatatatcaaattcatgaggctcctattcctgtatattgttacagagctgttcttgtatattgatgtttaatgatatggggccgaattgttattcaaataattacagcccattcctgattatttagatgctgattaactagtcaatgacttattccctttgacaaaatttcccaccctctggctttcctttgatgttaatgaggaagaggatccagttttcatcccatttggcaaggttggtttcatggactgagccactctggatgtaagatcagtagctactctgtagactttatggtaatggaagttaggttaggttgcatcagaacactcaaaagtcaagcctatcaccatatttgagaagaaactcacagtatttgatataccttagtggatttgaaacaacatcttatgttacaaaaaaatagcattttaaaaattgggtggggcactgtggatcactcctgtaatcccaacacttggggaggccagggtgggcagatcacttgaggccaggatttcgagactagcctggccaacatgataaagccccatctctattaaaactacaaaaattagctgggcatggtggtgcacgcctgtagtaccagccactcgggtggttgagacatgagaattgctttaacccgggaggcagaggttgcagtgaaccaagatcatgccactgcactctagcctgggcgacagagcaagactctgtctcaaaaaaaaaaaaaaaaaaaaattcaaaccaggcactattaaatgttatgtgctgatacaaaaaattacaaatttaaaaagaaaaatcataccacttccttcaataaataattaattagaggctgaacataacatttgtaaaaatatacccagaatttgcaaaactacctggatttttcagaacttacatacattttaccaaagtgcatgagatagtatcaagattcctgctaatagaaaagtatataacctgtgctgtaaataaagataaaagagtagagtgagtcagagaaagatggtcacctgagaagtaagtaagtgtgtcgcccactctgatccctgccccttcttgctcattgctgaggccactgtcagcctttgttttctctttcctactgttgagggtcagggtctaaacagagattcactggactgaactgaaaagacaactagattatagaacagaattctcctgaagttgggcagcattagggcaagctgaagtgtgcagtttttctttttctttttttttttttgagacggagtcttgctctgtctcccaggctggagtgcagtggcagatcttggctcacttcaacctcctcctcccgggttcaagccattcttctgcctcagcctcccgagtagctgggactacaggcacaagcctccacccctggctaatttttgtgtttttagtagagatggggtttcaccatattggccaggctggtcttgaactcctgacctcgtgatcagcccgccttggcctcccaaagtgttgggattccaggcttgagccaccacgcctggcttacagctttcagaattacattactgtcttcagacactgacatactttataatgaagccaatctttcacatactggcagcacagggaccttgtataaatggctgagtaaacagaggtaacttttctccttctattctgcctttctgaattctttttctgcatcacctgttcttcaatcttcctgcagccctttaactcttcttatttttgtccctttgggcaattttaccataaggcttgatagcattaagtaaatccctgcatgtgtgtctgtgtcttgtgtgtaatggttattttttttttgttagtttgtaatgcacttagcatattcctgtctaatcaagtaaacaccaacagtaatatttcttaaatttgtagaattattggtttttgacagcctgaaaatcatcctcaaaaaaaaggtatataaacacaaaatgttaggaacaactgcatggtattcatgcacccctggtatctatttatggatcccagctgggttcagatccctttcccattttgtagtttcaaaattagcagcttccatggtcactggtggtacaggttgagtatcccttatccaaaatacctgggaccagaagtgttttggatttcagacttttttgaattttggaatattggcactattcttacgggttgaatatccctaatctgaaaatctgaagtccaaaatgctccaatgagcatttcctttgagcacgaggtcagtcctcaaaaagctttgaattttatggcatttcggattttgtattttcagattaaggatactgaacctgaatttggaaatacatttattcatcagatactcatgggatgcttactatgtgccagaaaatgtgcagggcactgaaatagagtgaaaaagacattggctcacccatgaaaatgtataatgcagttgaggggagataggcaatcaaatatacaattataatacagaatacattcaataatagtggaagtacatatacttaaaagagcatgtcagatgagtatttaagtcagccttagggcatcaagaaattctccttacagttatatctgggtcgtttgttttctgaagaagaaggaatgctacgtttaaagttaagagagttacagatttatgtgtcatattgagaaatttggatttgattttaaaggaccttacattgaaggttaataagaattgatctgtaactgaaaaagataactgtaggatggaggtgggttggaggaagcagagtcagaggttgggcccatagtaagccaggtaaacagtagtggtgattttaacaaaagtactcatagtgtaagttgaaaagaagtgaatgagttgaaaatataagaattggaaatcacagaatttagtaattgaatttattccttccacaaatattgttgagctgctatgtgttaggcattctgttagatatggtggggaacaagagagacaccctgtctgtcctcaagtctagtggtgttgacttcagggcttttagagtggacaatttcagtgggtgatgatgccatttaccagaaatggaacagacaggtgtctcagaccaaagatccctagatgtgagaactgcttccttaatgccccttttgagatttcaagatgtccatgtgattgagaatcactgtgtctaatggaagtgtatctctatgtaaacaataactggggggggagtttgagaaccactgttacaggtgacagttgaagccaggaagtagatattacccaggaaatatatgtagaaagagaggaaaggatggctgaggattgaacctggcaaacccatggagagaaaagaggaagctgatggggaaacgagcagagtataaagaatctaacatatttgatcccgtagaatcaaagggaagaaaagcaatatggcagcaacagacagctgaagggcatattggatgggctcctggttcaaggtgttgacctgagcttacatatgagacaccacatgttcaccaccacctccaccatcccactccagttgtatcacctctaaagtgtccaaatgaaattagtaggaaaaagtctttatcactgcagaccaccaagaaaagatgccatgcaaatgcctagcttaacaaaacttggttccagcaagaactgttagcttatggttcatcccatgctaaggaggaccctgcctggaaagtaaacagagggccctctgaccagtgctcacaaatacccttcagcttacaacagcaggagctagagacctgggtgaactacagagtagttgtggaagaggaggggggacatattttgaaatgtctggagcctctggtaattacataggtactagagaacagagtcccccactcacagcacaaacgcatacccatgcgatggctcagaattctcacctggtttactctcagcaaagtcaggctaactgcagaagagacagtgctagctgcctgtgggtcacagtgatagacaaggagaggagagtcatctttaagctgcagtcactttttttttcttttgctggaacctaaaagtttatatcaaaaacccacaacatttttgatagaacactcacaattctcaatattggttacatgtagactctatctgggtaagcaatgtggaaaaaaaatcaccagacatggaaatgtctgtgccagaaactatgcagggcactgagatagagtgaaaaagacattggctcacccctgaaaatgtatgatgcagttgaggggagacaggcaatcaaatatacaattgtaatagagaatacattcaataatagtggacgtatatatacttaagagagcatgtcagatgagtatttaagtcagctttagggcatcaggaaattcttacagtgacaggattgttctctgaagaagtagtgctatgtttaaagtcaagagagttacagacttatgtgtcatatcgagaaatttggatttgattttaaagggccttaagctgaaagatgttccaaaaggaagatccaaaaggatctgttccaaaaggagaagattgtgagcaaccatagcaaatgggctcctttgaagcaaccttgcaaaaataataattttttaaaaaaaaaaacctctaaatttctaatgtgtattgtcattgaaaattgaggagtgattgtgttgataaaatcaagaatcatatctcaatgttattaaatagaaagtaatgatgattcactcttaaacatattctaacaaaattattatattttaaggaattataagaactataaagaactataagcatccagatgtgtgagagtcaggtaaggtggagtgagggaggcgatagttatctcaaaagaaagagaattactttgtatccaattacctaatagtcccgcatgctaaaaataatggagcatccgtcaccttaggcattagaggggaaaagcctcaaattttacagcttgctgaggcatcttttcttcaaagagcaacaggaagatcatctttgtcactgaaagactcacaacatatcccacttctgtataaatcccccaaaaagcaaaatttataaagacattctggagccacataagtaattagtcagaataaagaactcaagaaagggaagatattgtaagagttttttttttaagtagcatagaattaattgtgactagcagttgttaacagagtggtgtgccataaagctaatgataaatgattcctcaaaaaagaataatgtaacagactaatagcagggatctacaattatagaatgtttctcaacaattaggcaggaggaagacaaaagagtccaaggagagtaaaaaatggctgttttataattagcattgattaaaaaaatacaggataaagaaagttcaaagttgagcagtagcagagtaaaaataggatgaataatttcctaagttactcattctgttcattaaagagaggaggggaaaaaacttaatcaatatggctaaggggagagggaacttcttaacctatatggctaagggagggggaaagaaaccattctggaagcataaaaaaacaaaatgtagctttaaattaaaaccaaacatttattaccatgcagtgactaccctatgttgttaaaagacaaggattcgaattggcttttaaaaaaaattcagccactatatgatccaaaggtacatctttaaaaatatcataatggagaggttgaaaacacataccagacaacaaactaaaaaatttggggtgctactgttgaattagaggcaaaagtattatactgtgcaactttattattttttgctgttaaaaattcagtaaacactgtcaaagcaatcctcataaaactttcgtcctatcagaagacatttagaagtacaaggattggaagaaacacaactgctgctgcaatttggacttttttttcagagtaaatgaacattcgcacacaaaaaaagatatagaggagcgactgctcaaagcttaaactaataactacacactgtactttgtatgctacagaaagtaatttacaagatcaattaaatatttataagatttatactggccacaaagtgaattttaagggattttaaacattgaaattggccaagctctgtggctcacacctgtaatcccaacacttcaggaggccaaggcagcagatcacctgaggtcaggagttcaagaccagcccgaccaacatggtaaaaccctatctctactaaaaatacaaaaaattagcccggcgtggtggtggacacctgtaagcccagctactggggaggatgaggcaggagaatcacttgaacctgggaggcagaggttgcagtgagcagatattgcaccactgcactccagcctgggcgacagagtgagactctgtctcaataaataaataaataaaggtaagcattgaaattggacttgccacattctctcaccataatgctgacaaatacacatttacatcaaatattaactgaaataataatttgaaatttaaaaaagaaacttatctataacacaagtcaaaggctacgtcaaaactatagttaaaaatgattcacaagttaatggcaagaacatacataacttaccaaaatgtgtaggtgggaagagggtttatcaaaattagaggaaaattgttgccttattaagctcgatagcataaacataagtgagttacacagcaatgcaaggaaaaatctaaaaaaaatactaaggatagaaaaatgaaagaataatgacaatagcagcaattaatgaattagaaaagcagaaaaacaataaaatgatcaatctaagagctggattactgaaaattgaaacaaaattaagatcaaaagaaaatatgaaggccagctctgtggctcacgcatgtaatcccagcactttgggaggcccaggcagtggatcaccagaggtcaggaatcagcctggccaacatggtgaaacctcgtctctactaaaaatacaacaactaactaggtgtggtgaggcacctgtaatcccagctactcgggaggctgaggcaggagaatggcttgaacccaggaggcagaggttgcagtgagccgagattgcgccactgcactccagcctgggcaacagagcaagactccatctcaaagaaaatatgaaattaggaataaaaagaggtatataaccatagacgtgttgggaatttttaaaaaacatatttgaaaagtaatatttttaactctgtgacaattcagttttaactctgtgacaattcaatctgcaaaatgaatcttttcttttttctttttcttttttttttgagacagagtctcactcactctatcacccaggctggagtgcaatgtcgcaatctcggctcactgcaacctccgcctcccaggttcaagcaattctcctgcctcagcctcctgagtagctgggattacaggcatgcgtcaccatgcccgactaatttttgtatttttagtagagacagggtttcaccatgttggtccagctgctctcgatctcctgaccttgtgatccacccgcctcctcctcccaaagtgctaggattacaggtgtgagccaccatgcctggccccaaaaatgtttcttaaatgaccaaaatgagcttcaaatggctaacaactataaatgacattgacaaaaacagaatttaaagaaagactcctccctcccccaaaatgcaaattccagacatatttatcactcaatactgtcaaactttgaaggaacacaaatgtcctatgttatctaatctatttcaaagcatggaaatgtcttgtgaaactttgcattttattttatgaagctagggtatctatgaccaaattatttttttcctcatctttattgaggtatgattgaaaaataaaaacattatgtacaagtctacaacttgatgtttcgatatagatataaattatgaaatagtcaccacaatcaaggtaattaacatatctgacaccgcataattaccattttcttttttttctttttctcttgtgtggttaaaatacttaagatcagcattcttaagtatttcaaaccaatctccagtatactatataatattgttaactatagtcacgttgctttactatgattaaattctgtatttttttttttcttaaaatattaagaggcctggcatggtgactcacacctctaattctagcactttgggaggctgagtggggcaggattgcttgagcccaggagttagagaccagcctgggcaacatggtgaaaccctgtctccaaaaaataacaaaaaaaaaattagctgggagtagtatcgtgtacctgtagtcccagctactcaggaggctaaggtgggaagattacctgagcccaggaggtcaaggctgcagtgagccgtgttcatgccactgcacttgagcataggtgacagagtgagacattgtctccaaaaaaaaaagttaaggacacttccactaaaaccacatataggaaatcttaagtcaaatagcaaatattaataaaatctggcagaatattgaaagattcctaaatgtgaccagttaagatttggctcacgcctataatcccagcacttggggagcccaaggccggtggattacctgaggtcagcagttcgagaccagcctggccaacacggtgaaaccccgtctccactgaaaatataaaaattagctgggtatggtggcaggcacctgtaatcccagctactcgggaggctgaggcaggagaatcgcttgaacccaggaggcagaggttgcagtgagccgagattgcatcattgtactcccactggacaacaagagcaaaattctgtctcaaaaaaaaaaaaaaagatttgtttcactaatgtagcatttgttcatcattagaaaaatccataaaatggtaaccacattaagagatcaagaggaaagccattttcagtcattattactaagacaagttgtaatattactctagagtaatagagtgctagtgaacaagcggtgaactaaagtgaccactttccttgtgaaacttaagttccaatgggagaatgacagtaaacagacaactattataataagtgcatggaagattttggtgtatgttagattttcaaatctgtagagaaaagttggctcattcaataaaaattttgaaaccattgattaatgtcttaataactatatgttaaatctaaaatttatactttagatttaaatatgttacaaatgaattgaagattttaagattaaaaattgaaactaaagtgtgaaaagaaacagtccggggtgtttatattaccttatgttctgtttgaccttttcagtcatgtcagaaggaagcatgcttgggaagatttatgagctgaaggataatattgccctacttctgagacaataaagacaaaagcaattgcttcaaacttgcaagcattcagcaaagcataacatggttgcaagatgtattatatttgaagattttgcatataaagaactgaaactgcaaggggcaaaattaatatcatcaggctaaggcaggcagatcacttgaggtcagcaagatcagcctggccaacatagtaaaaccccatctctactaaaaatacaaaaattagctgggcatggtggtgcatgcctgtagtcccagctacttgggaggctgaggcaggagaattacctgaaccagggaggcggaggttgcagtgagctgagatcacaccactgcactccagcctgggcgacagagcaagactccatctcaaaaaaaaaaagtcaacatcattccttgatacattaagttttttcagagaaagtccagctatgctaatgagactcactaacatttttcaagtgtattctatgtattacctcatgtagtactgaagacagtcattggaagtatgcagatagggttttacagggaaggatatggagacacagaggatcatagtagcttgccctagggcactcaggtataataattggcagagccagcagccaggcacggtggctcatgcctgtaatcccagcactttaagaggctgaggcaggcggattacttgtggtcaggtgttcaagaccagcctggccaacatggtaaaaccttgtctctactaaaaatacaaaaaattagccgagtatggtggcacatgcctttaatcccagctactagggaagctgaggaacaagaatcttttgaaccagagaggcagaggttgcagtgagccaagatcatgccactgtactccagcctgggtgacggagcaagactctgtctcaaaaaaaaaaaaaaataggcagagccatgagtgaaattcaatcttgtaccagagtccactttattatactgtttcgaacatggttctgaattttaaagatctcaaaaaacaggttccttaagatgaattcagagaggggagaaatttcacttaatctgcttcaagagtaagtttggatgatagcatccccacatcacagctgacagtccatttggagcttataagaatccctttctcacctacatgcagtctttgtcagaaagatgttcatggggagtgttcgggactcaagtttcattcagctgacaaaataacttccagaaaatcactttgaaaaaattttgggcaaaacatttctctatttactccaaaacaaatgagtggactttgaatgccacctactcacttcaccaacatacatttttagagctggtttttctccatttgtgactataaaaggaaagcagtgcaatcagcctggcccactttgagttctctttcccacacccagtttgattgaaggacacaagattccttcaagcaagaatactcagtgcttatgtgggcatcacatgatcaaagtttctaagcaaaaatgtttttttcccaaaacctgacattgttttaggtttgggatgatggtgatcattattattattatttcaaacattaaaggcagacctgagatttttaagtttctttaaggtggtgtgaacttttgaaaacattcagaaattaccagctgctattgggaggaattaaaaataaaaaaggaaaaaacattgggaaacagtattttattatttatttgtttacttattcatttatttatttttgagacggagtttcgctcttgttgcccaggctggagtgcaatggcgcaatctcggctcactgcaacctccgtctcctgggttcaagcgattctcctgcctcagcctcccaagtagctggtactacagtcatgcaccaccatgcctggctaatttttgtatttttagtagagatggggtttcaccatgttggccaggctgttctagaactcctgaccttgggtgatccgcctgccttggcttcccaaagccaccacgcccagcaacactattttatatgtattatttttggtatggaaacataaagatagttataatgtttttctttttaaaaaaaaagcatcctttcatccacccagatttttctagccctcttactttaattaatccaaaaaagatgtgttatagcctattaaggttagactacctctattgatatattgctgtggaaatgttcatagcattaaacaactactgtttccttactgtaagtaaacatttattaactaaaaacaacctgcttttacttgtttcacttatattctcatgaattcagatttgtcttaaatttttatagctataatttcatccaattcttatttatttggtcatatgtctcttgcagacatttcttcggatttgttttgttttgttttgttttttaagagatggaatcttgttctttcactcaagctggagtgcagtggtgccagcatagcttactgcagcctcaccctccccagctcaagagatcctccaacctcagcctcccaagtagctgggataacaagcgtgagccaccacacccagcccatttcttagtttttatgttttaaatcagtctgaatcctgatctttacgcaggaagatttatgttgacagttgataataatgttgattataacattagtattaacctacattcactaaatctttactaggtgacagtaaaacaacatgcacaatatgatcctatttttataaaatatattttaatttatgatatgccgtgcagaaaaattatatagcagctgttaaaagtagttgtctttgatggtaggactgcaaatgatctgaatttttatgtgtgtgtttaaaatttctctagtaaaagcatagtggttccataatttaaaagtttaataagggaataatatagtcagctataggacaaagcagataaatgtcaatagctttcttatatactacccatacccattagaaagtttcagggagacgcagggaacagaataaataagcaaacaaaaattccattctcaataatgacataatacagaaaatgcccacaaatgaactggaaaaaaaagtattttcaaaaagaaaacttaaatttttgagagatctttgaaacaatggaaaattatatcacgggtcttaatgggaagacagtgatttttaaatgggagagacttgaatatgattaaatattaatgtagaagaggaaacttagagtttacatacaacagaaggaatagtttttcaagtagactcagtgaatatgggtagacatggagtttgagtgagagctagaaaatagatttttttcaaaacctgacattgacttttccaagtttccagcatatattcctgggcagaagatctcaataatagcaaaaatagcaaccacttattggatgcccgttatgtcttagacaatggaatagttattttcataattagctgacttcatctttaccaccttctgcaagctatcttcattaactccactttttaaataaagaagcaggcttttaaagcaaagttaaatcatttgctcaaggtcttacaggagctaaatgtcagagctgggatttgaacctagacctgtaatctaacatcttttttccctacagtatactgcattatactgccaccataagacctggacctcagaaggggaagcaggcttagggttagactttttaacatgctggatctaagagatttacacaatatcactttggtgataaaccattgaaatatggtctggagtctgaggaaagaatcagctgaaaatatacttacagatgtcatctggagatggttgaatccttgtaatcctagctgagattgcccaggagagtatagtcagcaaaaagaggatagcaccaattctgggaacacgaacttttaagagactagtaaagagaagctaatgtatgagactggaaagggatgacagaaagaagagaagcaaatgtgtaaaataacacacccctaccggccgggcacagtggctcacgcctataatcccagcactttgagaggccaaggggggcagatcacaaggtaaggagattgagaccaacctggctaacacggtgaaaccctgtctctactaaaaatacaaaaattagctggatgtggtggtgggtgcctgtagtcccagctactcgggaggcgagacaggagaatggcgtgaacccaggaggcggagctcgcagtgagccgagatcccgccactgcactccagcctgggcgacagagcgagactctgtctcaaaaaaaagagaaaaaccctgtttcatcagtattaagatttatattttcttgcatttgactatctcaaaaattggcatgtgtcttattatcaatgaggtcttgtaattggcagtacacaaattagtagtacataaatgggacatcttataactgaaggaatattttaatctggtagttgatggtttaaaaatcaatcatgcttatccatttctaaattattttagaatgaaagcatacgtttaacttgtataagtctatttaagcagtgcatagattagattaaatgaatggttatctgttagatgggtagttccggagttaagagcgcaagctccggaaagagccaaggttatttaaagtgtcctcacctaccagctgagtcctttgggtgaaactctttactcccttaagcctaaattttcttacctatagaacacagattaaaagtctctatttcttaagattgttgtaaggattaaatgatatagtacatgtaaagtacttagcactgtgcctggcaaatggtaagctctcagtcaatgataggcattctcatgatttccgattggaaagaaattggtgcccttcccatcctaccccagggtactgccatttctctttaagtaaagctagattatatctgaaataggcaaatatggaagtttatatacacttaagggagctacctgttcccttctcttgaaggatattaaactgtggtatttgctagagaatttgaattagcaggtgtatgtagattctgagccttttttgtgctcagctcaaagccttgaccatgctgaatacataacaaagtactgattgataatgtttaacccctaggggcaggctttcttttcgccctgagcaaaaaagatgcaatctttgtggatgggtgtttggggaattcctgcaatataccttagatgcagagtttcgggtggagttttgtttttatgtttgtttgttttgttttgttttgactttccattttccactttaactgtgatccattccaggggattttgtagtttctcagatgttatactggatgaaaagtagtaactgcataaacattagtttgagaatacagataatgttataaatcttcatcttggtttgtattgtaaaggcagcatctcatgtgacttatctttatatggaattgctaaattagtattgtgcctttcctccagaaagcttaaaatgaagtcgtataggcagcctgatttaaaagataattactattccatttcctaaatgttctaccatgcaagaagaatttggaggaaaaagaaaaagtttattcctttggggaaaattaattttactttgtcttggtaaaatgctaccacatatgcagttaaatgacaattccccctccaaaaaaaattttttggcagtcatagtcatcatgacttctcctataagattatcctagtgttcaggatgcttctcaaaaggcctagaagataacaaatatttgtctaagtgtgtttctaagggctgtaactaagcatctctcttaattcagcaaactacctttttttattcagtcaaaatttaccttttaaattaggcttgtaatttgattttcattggtatcaaagaattctcttttgactccaatattacatttaataattcaaactctaatatctctattgaaacactctgtgtttcagtcgtgtttgaagatgtctaaaaacaaaagtcttttgcatttttcatattctatttaatggctggatgcatgtcagtgcataggatttgagtcattagtgtgccacaaaacattttaccaagaaatggtgcgtcatcaaatagttgaattacaatggtagctgtaaacgggacccaatttacaaaagtaaatagtgtccccttttacaagaaagaaaattaaccatgctcattcagattctgaagtttaattagctttaacttgctaaaagaaagaaattgaacaagtaaatagcatgtacttcaccatatatagcaaatcctgaatcactgccattttttatataactgacccacatgggttctttgctttttcttttatctgtttacctcagattttttttttttaataaaggactataatttgattggcttgtaaattcttcccatttctaacatgctataagactttaagcctaatttcctttgagccttaatcctcttgctaattgatgtgactgagttgtctggaatcaacctccttggtgcaaatgactgagactgtgacgttctatggaagcagtttggtccgggaatgaatcctttcattcagcaaacaaatgccatgccagctgagtcctgaaagagctcatgggcacgtaaaggaatatagttgttttacaacatgtcccccaaaattatttgacactcttctcattagcaagtgggactctgccccttccacttggatctgagctctgtaactgcctgccaatagaatatggcagaaatgacgcattgtatcagtttctgggcccagaccttaagaacctagcagcgtccacttcctgtctccttgtatgctcactcttggaacccagctaccatgctgtgatgaagcctaaagacccaagcagagaggaaccaacttgtcagctgtatgaatgagccatcttggaggtggattctccagttccaggagagctgccccagttaatgctacatgaaacagagacaagtcatcagtcatccatccccactgtgccctttccaagtttgtgagcaaaataaatgactgttgagttaagccatagagtttaggaatgatttgttgctggaacaaggaggtagacacataaacaattttgaagcaatgtagattacaatgacagtgatatttactacgtatcacaggaacactgagtcgagacacctaatccttccttcatcatcaaggaagactccctcaatgaatgagatggcaactgaactgaatctcaggttaaccaggttggagaataaagggtggcgtgttctaggcagaggggacaacagtgtgatcacaagcagagaggaaggaaacaacatggtgtgcagaaggaattatgagcacttaggtgttgctggagcttaaagctggaataggaagtactaattatgtagccagagataattggcaaaggttgaatcatgaaggcccgtgtttgccaggtgaagacatattgtgtacacacagcttgttattttcattattgttgtattgcattttggattgaagctgtctgatcaggtttgtgttttagacaaatccttctatcagcagtggggaaggtggatttcagggtatgaattctgaagcatgaagaccagtcagatggccgttgcagcagttcaggcaaggacaatgaggcctaaattaagactgcgagggtgaggatggggaagagaaactagagtcaagaaataggtggttttaaaaagaagtatttagagggtaaaaagaatactaactggccggatgtggtggctcacgcctgtaatcccagcactttgggaggctgaggcaggtggatcacaaggtcaagagatcaagaccatcctggccaacatggtgaaatccctgtctctactaaaaatacaaaaattagctgggcatggtggcgtgcacctgtagtcccagctactcaggaggctgaggcaagagaatcacttgaacctgggaggcggaggttgcagtgagctgagattgcaccactgcactccagcttggggacagagtgagactccgtctcaaaaaaaaaaaaaaaaactaactgattatagggaggaaagagacagtgaaagaggaccctcagatttctaagttaggtgaaagctagatgccagtgccaccagaagggagtgagggggaatataaggaggaggataatgcaggggcaaagctagagagtacagctttgacgtgctggatatgtaaagtctctggcatccatgtagcgatgtcagtgaggcagttggaaatacatgtcaaaaattaaaggagatttaagctgtaagaaaagatttggcagccattgtcacaaaattgctagctgaaattatgcatagacaagctcacccaggggaagaatgttcagttaaaaaagaagaggactgttgggtgcggtggctcacgcctgtaatcccagcactttgggaggccgaggcgggtggatcatgaggtcaggagatcgggaccatcctggctaacatggtgaaaccctgtctctattaaaaatacaaaaaatcagctgggcgtggtggcacatgcctgtagtcccagctactaggggaggctgaggcaggcgaattgcttgaacctgggaagtggttgcagtgagtcgagattgtgccactgcactccagcctgggcgacaaagcaagactttgtgtcaaaaaaaaaaaaaaaaaaaaaaaaaaaaaaaaaaaaagagggctgaaggtgaaactctgggagcaccctgacatgtagaagttagttaaaggagtccgggcctgtaatcgcagcgctttgggaaacctaagcgggcagatcacttgaggtcaggagttcgaggccaggctggccaacatggtgaagccccatctctactaaaaatacaaaaattagtcaggcgtggtggcacgtgcctgtaatcccagctatttgggaggctgaggcaggagaatcacttgaacccagaaggcagaggttgcagtgagctgagattgtgtcactgcactccaacctaggcgacagagcaaggctccatctcaaaaaagaaaaaaaaaaaaagacatttaaaggaaaatgtgcccacaaaagagatgggaaaagaatgatccaagaagttccaggagaaccaagaaggaggagtcatctcagaaaccaaagtcagagagttgaaaaagggggtaatctcctgtgtcaaatgtaaacagtcagtccagtaagataaggattgaggaagggtcattggtaacttttgccaagctggacaaaaccaaatttctctttttttttttttttttttttttttttctgagacggagtctcgctctgtcgcccaggctggagtgcagtggcgcgatctcagctcactgcaagctccgcctcccgggttcacgccattctcctgcctcagcctcccgagtagctgggactacaggcgctcaccaccatgcctgtcgaatttttttgtatttttagtagaaacggggtttcattgtgttagccaggatggtctcgatctcctgacttcattatccgccctcttcggcctcccaaagtcctgggattacaggcgtgagccaccgtgcccggccagacaaaaccaaatgtcaatggataagtgcatggaaagtaagaaaatagacaccaatggtacagccaaggcaatgaagagtagctagagaagaacacaggagcatgagagggtggtggtggtggttttggagagatggaaaatacgtaaatacttttatgacccaaatagctcatgccattaaagggaggagattgaagagagaagaaaaagaagatgtgattcatgtagtagcatctattcagagatagaagggcagagagtcaagggcagtcttttgggatacagtaagtgtgggtatagatgtaaatagttttataagagtagggcaggagattgaagattaaagctgatggacttaatttttttctgtgaaacaggagataagtttgttcactgagggaatgagtatagcagggattgatagctgtgttaaagacagtggtgagtcttagagtagtcttttaagaaaatggaaacaagggctagctcacaagaggcaagaaggattgataggtgacccagaggtccagttgactttggagattatggtcttatactagtaatctgcacagtttagggcttttattcaagggaatgccccacccctatcccattcacccccgctccccccaccccactttcctggctcccctgagtgagggagaatgggcaagcctccataggaaagcagcctcagcctggacaaaagcaaagttttgtttaagacaacagatggagcattctgtgtgcaactggaggatggcttgttttgttttttataatggcatgagggttctagaaagtaaaataataggaaagattagaagggactcaagaatgagaaaagccacagataagaaaacacagaggagtaagaggatgagggtaatggagagaggtgggggggttatgggagtggcaatgtgatttgcttcttatttagtcgccagaggttagttgaaggaaagacttggttggaagctattgcctgacatttccttggtacaagacattgtggtcacacaactgaccagtggtccttagcagtttctggcctgctcacagagctttgttttctgtttttgagacagagttttgctcttgttgcccaggctgtagtgcaatggcacgatctcggctcactgcaacctccgcctcttgggttcaagcgattctcctgcctcagcctcccaagtagctgggattacaggcatgcactatcacacccggctaattttatatttttagtagagacggggtttctccatattggtcaggctggtcttgaactcccgactcaggtgatccgcccacttcatgctgggattacaggtgtgagccactgtacctggcctactcacagagcttttaaagagaaagtgagagtcctgtgccagacagagatgggctcctgagtgaactctgccagccccagagtttgcagtagagcaggagtccccagtcggtggcctgttaggaactgggccgcacagcaggaggtgagcagcccacaagcgagcattaccacctgagctccactttctgtcagatcagcggtggcattagattctgatagaagcatgagccctattggttgtgcactccttatgaaaatctaactaatgcctgatgatctaaggtggaacagtttcatccagaaaccatcgtcgtgtcctccctacccctgcccccaccacaccccagtctgtgacaaattgtcttccatgaaaccggcccctggcaccaaaagttggagacaactgcagtagcgtacttgcttgagttatcccatagagttgtggaacagcaacatcttaccctgtggcctactcttgttattgcagtacccacaaatttaacagtagtaatcataatataaacaatagcttatatttatatggctttatgtttattaaatgttggtttcaacaactctaaaacagggtaggtaatgttatctcattcataggtcagaaagcctgaatctcagagggtaaggtcatactgctaataaatggatgaaataaaaatagaaatcagatcttctgacttctagctcttttcagctatgccacactgcagttttggagctggaaactgcattgggctcatgtaatccaacctcttctcttatagatgaagcaaccgaggcagcagcctggtgaaacaaaaagaaagcagatattgcaggctggatattctgggataaatattttatttaaaaatcttttaatgttccagaaaggttcagtaactttctagtggccacagtcagtgtcgaagccagagctggaacacaccctactacacgactcttgggattgggtttcaaatcaagaaatgtgggaggacatatctctgatgagtcagaatagtggaagggagtggccccggaatgtgactacctggaagaatctagttccttaggctaagtcactagtgttagcccagtataaaaatgtgtttttcagaatggaatcaggagggtaaaattaaagatgaaatcatctgaatagcagttctctaccaagacagcactttagctaaaggatgattacagtgtagggcggttcattttgattcactggggctatatctctatactttcgtgtgtggtagttgctttccccactagatctgggttctagccctccctgctggctccctcacttagtggacgttgaacctttcactttccttctcggggcctgagtttcctcaataaaaagaatttggatctaggtggccgtcttctttgtggtttaattccctaatttcatttcatttatttatttattttcttttttgagatggagtcttgctctgttacccaggctggagtgcagtgatgtggtctcagctcactgcaacctccacctcccaggttcaagtgattctcatgccttagcctcccgagtagctgggattacaggtgtgcaccaccacacccagctaattttgtatttttagtagaggtgaggtttcaccatgttggccaggctgatctttaactcctgacctcaggtgatccacctgccttggcctctcaaagtgctaggattacaggcatgagccatcatgcctggccaaatttcttaatttcagatataccctatggcacagatattttaaggcaaaacataggtatattatgccatacataagtgtattggatgaagctgacagagaaaagtatataatcattctgagaaaagaagcctcgatatttacatttcggtgaaaagggggagaaaattactgttttgcgaatcaaccaaagtactccatagtcattacagaagcatgtacttacctgtaattttttgtggaattgttcaaagtttattgtttaacacttattgacaatcactattatgctggatactatgggagcaagtttatgcaagctaatcccctgctgtgttaatctagggaaagaatggaacagtgatcaaatttgcaaggttagaaatgctaaagctcttgctttctgtcagaaaactccagctaggtattcaaatttagtcgagatccaatatcagaaagcctttattatttattgaagcatctgctctttctactttttccatttggcttctgtgctctgtggttactattctcaggtaattgggggtatgacttcagtcacttttgaaatattgggaactaaattctctcattggagattcagcacattcaggcattttaataaaactctagtatcttgaattctggaaatttaattagtatacttacactttgaattttttcttgcctgaaccattacacatttttacagaacaaatatttaatccttaagatttcataaccaagggatttaaagattagctttgaaaataggtcagggaaaatatccactttggttaaaagctaatcatgtaaagaagtaaaaaaaaaaaaacaaaaacaaaacagcttagaagcttttgaaaaacatttttaaaaatcaattgtattggctaggcacagtggctcacgtctgtaatcccagcactttgggaggccagcatggtcagatcacctgaggtcaggagttcaagaccgtcctcgccaacacagcaaaaccctatttctactaaaaatagaaaaattagccaggtgtggtggcgcacacctgtcatctcaattactcgggaagctgagacaggaaaatcactggaacccaggaggtggaggttgcagtgaattgagattgcaccgctgcactccagcctgggtgacagggtgagactctgtctcaaaataaaataaaataaaataaaataaaataaaatataaaataaattgtataggccgggtgcgatggctcacacctgtaatcccagcactttgggaggctgaggcaggtggatcacaaggtcaggagattgagaccatcctggctaacatggtgaaaccccgtctctactaaaaatacaaaaaattagccgggcgtggtggcaggtgcctatagtcccagctacttgggagactgaggcaggaaatggcatggacctgggaggcagagcttgcagtgagcagagatcgcgccactgcattccagcctgggagacagagtgagactccctctcaaaaaataaataaataaatagtatacaattttgtgaaagtatatgagtcaaactttcctttagtttgccattcattcattcatccatttattagtattcatccatttattgttcattcattcatgcaccaaaaattgttctagacactagggtagcaagaataaataagacagtcagagcttactatgtgccaggcactttgaaatttggagctcaatgcttttagctccacaatctggtgtcatggtgtaagcattacactggaagtctagtttttttttctaaaaactcactggtaggctgtgtggctttaggtgagacccattctgtgttagtttcctcctctctgcagtggtattgctcactctgtttacttcgtagctttgatgtcagaatcaaatgaaatggtggttttgaaagagctttggaagtcccaggtgttatataaagcaagtagtattcttgtaaatgtggcagtggttttgaccatttcagtgcctccgcgaaaaaggttgaagatgagtatctttatattgttctcttgaactagatctatatgtttatgctggtcagtcttaccatttcctccacttcctgtgcaggcgacagggacctcataatgaggtagctgggggaatgataactatagtgaatgaaactcatttagaaaatattattcaatttacacattgcattaaatcagcaagtaatgattaagtgctcagattaagggagcagagagagagataaggtaggagatggcatctgtcttcaagcagcctagacttggatttgaaaattcaaagcgattgaatataaatcattacctaattgccatttcccagggatctatgtaggtatgtcagtttggttctataatgtttgtaagggtcctctcttagacgttggaatactcagttatacctactggctcatggaacaggtgttcttaggaagaaactagaaggttacttctagcttcatgttaattttactgctggatcctaggtttaccatgttcatgctctagaaagaagtaagagggctgggcgtggtggctcatgcctgtaatcccaatactttgggagaccaaggtgggcagatcacctgaggtcaggagtttgagaccagcgttgccaacatggtgaaaccctgtctctactaaaatacaaaaaattagctgggcatggtagcacgcgcctataatcccagctactctggaggttgaggcaggacaatcgcttgaacccgggaggcagaggttgcagtgagccgagatcatggcactgcacaccagcctccgtgacagagcgagactccatctcaaaaaaaaacaaaaaaaaaaagaagaggcctgatatgacctagaataaatttaatctgggactaactcaggaatccctctcaaatatcagctctagcgtgtaaagagagatttttgtgttttactcactgctgtctccccattgcctagaacaattcctaacacctggtactcactgaaaatgttttaaatgaatgaaagctgcagtcccctgtttagagtttttctactgttctcatgtctcagatagatggctccttgaagacaaggactatacattatgaatcttcagatttcccatgtctggcacataactggccctctgaattttctccaacgaacatagagacaagtgtaatccaggtccatgagggagtctctccctagagtaagccctaaaagcagtagatgtgcttgttcccagggagtctgaggcatagcccaaagtggactgtcatgagtgtgaatttcattgacatttcttttttaatcttagcatttctgtttatttttgagtttgtacttcattcatattcctttaaaaaggttataaccctcaacaggatggagaacatatgccttatgtatatcctctgtggagtcccattcatgcctgtcactctcagcagcgcctgtcccaggacagggcaggctgttcttgttttttcctttttttgaaatggagtctctctctgttgcccaggctggaatgcaatggcgcgagctcggcttactgcaatctctgcctcctgggttgaaacaattctcattcctcggcctcctgagtacctgggaccatctgcgcgcaccaccacgccctgctaatttttgtatttttagtagagatggggtgtttcaccatgttggccaggctggtctcaaactcctgacctcaggtgatcagcgtgggctgttcttgaagctacttcagaaccgtgtaagagctgaaagacccagagaaaattatcacagggtaggagagaaaagtaggacaattcgccagactcattttctgggagttttcttataccatcttgcagcctcattaactcttccaactctttataaaataataatactgaaaaatggccttatatcttctagtaccttgacacatgcaaatatctcatttaatcttcacaacaaccctgggaatgtggcttttgttttgtttttattgttagtactatacaaatgagaaatctcaaaccaggagcaggctgaaactagggtgagagtcctcacctcaggcacaaaacttaaggggatgccaaaaactcagtaatcaagtaatattttatgtagtatcttaaaaattaaagtttatatacagttcaacagggccaggattaaggagaggcaagtgaagtgaattatgccagctgcaaggttggatcctggctttatttaattttttttttggtagttcatgaattttttgcattaactttgttattattattatcattacttttttttttttttctttttgaaacggagtttcactcttgttgcccaggctggagtacaacggcaagatcttggctcactgcaacctccacctcccaggttcaagcgattttcctacctcagcctcccaagtagctgggattacaggcatgcaccactgtgcccggctgattttatattttttgaagagacaggagttctccgtgttggtcaggctggtctcgaactcctgacctcaggtgatccacccatgtcggcctccaaaagtgctgggattacaagcatgagccactgcacctagtcttttgcattaactttggtttttaaattattgcgttaaaatgctgctatctttattcagttttttgttttttgtaccctcttaaattttgcctctcaggcaggtggccgccttactttaccctagtccgtgccttgccttagagatttaattctgtaggtcatatgacttgtaagaagcagagcctgtgttagaaccaagacttctgactccaaatcatatgctcttctcatcataccacatagccacttaaaatgcctagttttctttgtctctgaacatctattgatccttagttgttttttaaattttctcagacttgtaggccccattatttgagaatgactttcatggttccttttgacctttctgtacttttttttcctgtaaatgtgtatcatgaaccctctattactttaagttatttgatttgtaagcatttctggatgaattgtctctcaagggcacacttcaaaatagttgccttacttagaacaaaatcctgtgacccgaataaagaacacatgaatatagctaaccctgtgtgagcttgcggggcaggtcaaattttttcttttttttttttttttttgagatggagttttgctcttgttgcccaggctggagtgcaatgcgcgatctccgctcaccgcaacctccgcctcccaggttcaagagattctcctgcctcggcctcccgagtagttgggattacaggcatgtgccaccacgcccggctaattttgtgtttttagtagagatggggtttctccatgttggtcaggctgaggtctattttttaaaccccatcaaactgtagaatgaaatagtggttagaaaagcaactatgaattcagtggcatgtcttataaagtcagaattcctacagactttactctttagtgaagtttcttgaataatgaaaatagttcataacaagaacaaacacaattaacactgtctgtattcaccttctggtgggggaagtgcatcagactatatgaaggcataaatcacctttttctgttaggattttgttttatacaatgtattatcaatttgtcctgctatatagttggagagaatagaatgctgtctccaactgatcattttccttatagttgaccttactcctgaataaggttcaggctttcatgagaatttcagatccagtatacctgttggggatgaatagcaaaagaaagtactaggagtttgggattagaaatagaagataaaagagcaataatagacttgtgtttccttgcaattcaggcttagtaaaggaagtcggaggcaaggaaacttagaccttcaaattgtactccagtgtctgttaaagaggaagaaggagagatgttcagaatcactatgtccttgggaatatcacaggacaaaaactttatttataaataaaggtaatctgaacatttggtttgagcatcaggcacagaagcagaaaagcataacttttcttttttctttctttttttttttttttttttgagacagagtcttgctctgtctcccaggcagtagtgcaatggcatgatattggcctactgcaacctgtacctcctgggttcaagcaattctcttgcctcagcctcccaagtaactggattatatataggcacgcactgccacgcccggttaatttttgtatttttagtagagacagggtttcaccgtgttggccaggctggtctcaaactcctgacctcagttgatctgcctgcctcggccttccaaatgctaggattacaggcctgagccaccgcgcccagccaagggtaccttttctaaatatatgttctctttattggtttactttagtgagacaaatatgtgtaaaggctttcgtttgtatgtatttttatgtgagaagtaaggctagacagtgaggaccaaatgtgagaagtaaggctagacagtcaggaccaaactgctaaaggagttgaatgctacgctaagaaatcagtactttgccaggcatggtggcttacacctatgatcctagcactttggaaggctgaggcgggaggatcacttcagctcaggaattcaggatcaacctgggcaacatagggaggcctgtctacaaaacaattaaccaagtgtggctgtgcacacctgtagtcccagctacttgagagcctgcggttgggaggataacttgagcccaggaggttgaggctgcagtgagccaagatcgtgccactgcattctagcctgggtgaagagcgagactctgtctcaaaaaatagtaatcgatactttatctaataggtcatgttgaattatagaagacttctgagtgagagatggcctcatcaaactcatttttcaaaaagtttaatctggtggaattaggaaggaaagagaaagcagagagagtacttatccatgcgtaaaaacaagtattttttggctgggtgtggtggctcacaactataatcccagcactttgggaagctgaggtgggaggatccctggaggccaggagtttgagaccagcctgggcagcacagtgaaaccctcatctctatttaaaaaaaaaaaaaaaaattaactgggcatgatggtgccacctgtagtttcagctactccagaggctgaggtggaaggattttttgagcctgggaggtcgaggctgcggtgaaccatgatcacaccactgcactccagcctgggcaacaaagcaagatgctgtctcaaggaagaaaaaaaaaaagtattttttgagaaggtcaacatttggttagtgaaattagaaaggaaaggaaagttgtgacgtatgtggcaaaggaaattgacattgtcactggcacttctattggtcgtttgaaggagaaagaagttaaaaaaaagagaaaaggatcccaaggttttatcatgggctgcctagagaatgatcactccattaacaacaacaacaacaagcaaaaagaactatttggagaataaaggaaaagatggtatatttcattttaaacatttctttgaagcagtggtgtgatgagtaattaaaatattccttaggttgttggggatgcagacctggaatcagagagaaaaatcagggctaaaaatgaaatatttagaaattgcatatccaaatttaatgttaatgtttcagcagaaacaaaagagagagctgagatgcacatacacccattgcctagaaagagaaagagatgccctgggaggaatggcctgagatggaggaggtgtaagatcccatagcagtgcatgagccaagagaggaagtaattttaggaagagtggtatggccagcagtgccggagcctgcagatcaaaactcatgagtaatcataggagtagtcttgagcttagaaaatacaaattgagatcttggaggagcaagagtatcaaaaagtaggaattttaaaatttggcaggtattggggaagagatcatgactttttaaaaaatatattgtttagtttcttgattctcttttttattccacaaaatatgaactcatgcatagctatctttgcttattacccaaaatggattaagatatatttgactctttaactttgttttttgtttgattttttgagacagagtcccactctgtcacccaggctggagtgcaagtgacacgatctcgactcacttcaacctcctcctcctgggttccagtgattctcttgccttagcctcccatgtagctgggactatatgcacgtgccaccacacttggctaatttttgtatttttagtaaagacagggtttcatcatgttgacaggctggtcttgaactcctgacctcaagtgatcaccttcctccgcctcccaaagtgctgggattacaggcttgagccactgcacccagccgactctttaactgagtaaaagaagctggttcatatatggctgatttggtctttgaaatactgtttaactttgtatctatggagcaaaaccatgccactataaaatgacactcctctgtattctgctcactgcttgatcaatttatttcctgtgctcatcatggcttggatgaagagaagttttttacagcaggggtctgatgaatgtgaacattcaatgatcatagctttctacaagatcattaagatccttgttttatgctttgagtatttgcctcttggcaatagttcatggaatctgattaaacctataagcttggaaagcaaatcgtttaagtctgtgttgcagaggataacttacttcacatgaatctcaataataggtcatcctgaatcagtcatcatcaatagttaacaacatctatcaagttaattgctcaagagccttttaccaagctgagagtgtaacaaagtaagctaaacataacttgttaacttgtcctctggaagccttcattcagtcagtcatccatttataatttattgattacgtatgtactttatgcaaggctgaactaaaggacaagcacggcccttatggttctttaggactagtctctttacaaataatgagaatttcaatacagtcttgcaactgtagtagcaataagcataaggagctataagaagagagagagtgtagctagaatataaggagagaggtaaaaaatgaagttggagacagtatacaggagatagattatgaacatccttatatgacttactaaagaatctgaaaggtccaggtgcggtgactcatgcctgtaatcccagcactttgggaggccaaggcaggaggatcatttcaggtcaggagttcgagaccaccctgggcaacatgctgaacctctgtctactaaaaatacaaaacttagcggggcatggtggcaggcacctgtaaacccagctactcgggaggctaagacatgagaatcacttgaacccaggaggtggaggttgcagtgagccgagatcgcaccactgcactctggcctgggtgacagagcgagactgtgtctcaaagcaaaaaacaaaacaagacgaaaaacagaatctgaatgttatcctgaaggcaatggcatgtgttgaattgctttaaatagaagcaagttatgatcagcagtgtgttatatcctgggtagggtaaaagataggcctagctggatgcagtggtgcatacctgtagtcccagcaactcagtaggttgagatgggaggatcgcttgaggccggcaattctgggctacagtacagtatgctgatcgagtgtccacactaagttcagcatcaatatggtgacccctcaggagcagggaaccaccaggttgcctaaggaggggtgaacgggcccaggttgaaaatggagcaggtcaaaacttccgtgctgatgagtaatgagatcacacttgtgaacagccactgcactccaaccagggcaacatagtgagacaccatctcttagaaaaaagaaaaaaaagaataaatgtaagtgggagggaaaagtggaggcagggaagtcagtataagactactctaggccaggagtggtggctcatgcctataatcccagcactttgggaggccgaggcaggtggatcacgaggtcaggagttcaagaccagcctgaacaacatagtgagaccccgtttctactaaaaaacacaaaattttgccaggcatggtggtgcgcacctataatcccagctactcaggaggctaaggcaggagaattgcttgaacctgggaggtggaggttgcagtgagcagagattatgccattgcactgcagactgggcgaccaagtgagactccatctcaaaaaaaaaaaaaaagtattactctagtgatgaggtaagtagtgaggggggtctaagttaagatactatcaaagtggacataaaggggaggaattaaatttgagagaaacaattaaatttgaaagatatttggaatgttgtggtaatcacttgaatggaagagataggtggaaataagagacagagtagagtcaaggataagtttcggcttaaatacctaggtattaagggtacataggactgatgtcagcctttggttatcttggacatgaaggattacaatagctgagtcatcaaaggctgattcagtccctgacatgactcctagctgttcatctttgaaaccagtaatgaaatggcttttggccccttaaaactgagacctttggaagagtgctgaataggtatgaatcaggtttcataggcaggagctcctggggtttcaacatcagcgttctggaggatgcatgcttgattttattgcttttgatactgtttttcactcatgctttttaatgactctgtaatcatgtgtatgttttatgtttcaccttgagaatggctgttatacttagcactttatatcttcaaagaattcagcaatattaaataatctgcataatatctctgtgagtttataggtggggattattgctccgtttttcaggtgggaaaacccagagatattcggtgacttggccaaggctatttagccttacattgacaactgaatattgaatctgcagtttctttcttttttttttttttttttgagacggagtctcgctctgtcacctgggctggagtgcaatggcgctatctcagctcactgcaagctccgcctcccgggttcacgccattctcctgcctcagcctcccgagtagctgggactacaggcgcccaccaccatgcctgtcgaatttttttgtatttttagtagagacggggtttcattgtgttagccaggatggtctcgatctcctgacctcatgatccgcccgcctcagcctcccaaagtgctgggattacaggcttgagccaccgcgcccggcaaatctgcagtttcttcattttatcacacttacactagaagtttaatgtccatcttattatgtcacgtttgctttttcacttacttattcaaaaatctcagcatttagatctagaaaaggacatacaagatacagaaaagagtggaggtgaccaaatgactaacctggcacatggggacaggaggagtgtaatgtcactagttctaaactaaaagattgtttcttttccagtggtgctatgacatcatttccgctaacagaccagtcagtcattgtgttacatagcatcctgtgacattgtagtataaccttaacactttatactgccacaataaaacagttatagaaattgccttattatgtatatatatatcccagctacttgggatatatatatatatatataatatatatatatacacacacacacatatatatacacacgtatatatatatacacacacacgtatatatatacacacgtgtatatatatacacacacgtatatatatacacatatatatacacacgtatatacacacacacacatatatagacacacgtatacgtgtgtgtatatatatataaaaggctgtgtaatacggtggaaagagaactgacttgggagctaggccagggttgaaacccctcccaagagggagctgggtgacacggggcaggatcctgattctgcagcagtgtggaaaggattagatcttgatgtatgtcagccgcctatcatagaacctgacagttactgcttcataaatggttgttgttacttttattctcattcagagacaaagtataatactgaaaaggccagtgacttccttgttgaaagtcaggaccaggtaaattcaactgttgaggtgttacagcctattaaagacgccagtgagacattttggtattgagtcaaccagatactgataccatcccttgttcactgacaaatatgggaaggtaatttcagtaggtcagccatcagtgtgtgccttccaaaacattatagtcatgttacagtaaactttttatatttgttgcatcacaaagatttattgaagtgataaaagttattatggaaaacagtgtgcggtaactatggtaacagttatttgatctcacagtaattagctaagcatttagttgcacaatactttcacaatgccttcctggttagttcattaaacaaaattagcttttgtttgaactgccttcctacagcgtcctaaatttgattttagttcaaaggaattggaaaatgtattttaaaactacctttccaacttacagtttatggacatatttgaggttgcaactggcttttatttaattctttatttatactacactatgataacgattcactggattatcatctgaatttctcttggaaatgacctaagaaatgaacagtaaagttggagaccagtgccttaattatggccctgttcctcactcatattgcagattggggtcaacaggtgtccttcttaagactttgtttttatacctgtgagtttggggtgctgtataaatgttagagtcccaggatcacacaagtggagtcatttcttgatcatctgcatacctcctgctgggacctggagctagcaggtgcccaggctttttctaaagcctccctcctccaggtgcctcctctgccctgctcagcatagcttgtgctgtgtttagcacctctttttgcaaggtggaatgtgctgcagatgattcacctaaatgatgatgtcatcctcagaggacttcagagctcttgagacaagggcctctcagactgtttctactctgcacccactctccactcactcccagcagacagggaagcttaacccgtactgcttggcagattggagatcccaagcacaaaagaaagcttcaagcattcaagattttgaaactgaaaaatacagaaaatgaaacaaaaaaaaactttttaacttatttactaaacatgaaggggttccaaagtaaattagtgaaacaggattttttaaaatccaatcaatgttccttgtattaatttcattttaattcctgtcacctcagtgatttttttttagttcatttaattatttttaaaataatactagcttttaaaaatgaattgctttctgagttgtgagtcaagctcttctctcagttaactccatgtcacctaccagttttcagttagacaagtttttttgcatatggtccataacatttccagttctatgcatttttatttgcctatttaggtcattattttctaggtaggagagatgcatcttcagtttcactgacaaggaatagaattctagtaagtaactatttgtggccaggcacggtggctcatgctggtaatcccagcactttgggaggccaaggcaggcagatgacctgaggtcagcagttcgagaccagcctggccaacatgacgaaaccccatctctactaaaaatacaaaaattagccaggcatggtggcgcacgcctgtaatcccagctacttgggaggctgaggcaggagaattgcttgaacctgggaggcggaggttgcagtgagccaagatcgcgccattgcactccagcctgggcttcagagggagactcagtctcaaaaaaaaaaaaaaaaagaacctatttgttcttgagtagtcttgcaatttttcaggacaatctgaagatgataataataataataataataataataataaatagaataatatcctaggtggcttcagcacctgacttctttttcccccatcttccctatccctgcttttatctggtatgatagtcatgtgtcagctgatatcaaggcccctaaaactcttcacaccccccttccatatccttttcctgtccataggagaatgtctttctctcactccatttggaaaacatttgatgtcctttgatgcaactctcatttcagcttctgtgaaactttctgaatttccctcacacttcatcccgtcttctagccctctcatgtcatttgtacctaattcttagccacacatcattattcattataatttgtggttaaaaactatcttgccgagtgggctatgaactccactagagaagtgccactctttattcttccctgtaccctcccatggtatccagcaggtaagaacgtgccctgtggatagccaaccaaaccactgagttctcttcctcttactgccctctaacttcctgaattctactcatttgtatttcctcgttggctgcccagcccagccacactggataatcaccctcccaactctcccaattttgattccttttctctagacctaatgttttatgtagggacctctagccacttcagggaaagaggaaacgaagtactatttattgagtcacctaatgtgttttcgatgccgtatgaggtgttttgctgatttccacaatcctatgaataaatactaatatccagatttttttttgtcatgagaggctaaggttcagaatgattaagtgacataatgagctagtaattgtaagagctggaattcaaacccagaacgctccgcctgcaaaacccaagtgtcttcactttttccagtccaataactctgttatgtctttagcccgacctaaattccagccttagccaatgtcttagagtagtcactggcaccctatattcctttgatctcatggccttctgtgccatcagtcagccagaggtctgccccccgcactgggtcttctgtcctgctgtagtgctcaagatgtctgccaaagaaattcagagattcttccagaagtggctttttacaaagacaggatactcaattacatttagacaaagaatgcccagtccaccactcacatagcaccccagcccctgtactgcccagggccagcattgacaatcatgagtacattctcaatatagccttccaggaagcccttagccaatcaaacagaatggaaaccatagattaaatctgtttcccactctgatttgcttccaacttgctgttgctgtgtagttttcctgcccttctttgttggtcttaccatgcattcttcccaccctaaaacccctcttccttactccagactaactggaggactgattgtattttactttgcttactgataccttttgctttgctttttctcacactaatttttctacttggcctaccttcctcctatcactgattgtagaataattaataatggaatagcctcatttgagtataaacttcataaaggcagacgcatatggttattatatctgattgtatatacagtccctcatagagtgtctgacttatggtagaacctccatgaacctttgaataaagaaggaaggagaaagggaaggaatggtggatttggcacaggtattatactatatacagatgtatttttgtttgtttcatcctaataacccaatgaagttagtgttattcctgttacagacaagcaaatggaatctcatagaggtcactctgctagtaagtggaagagcttcctgtttttcactgacctgccaaatgccatctcttctggaaagccttttattattcccccaccttgaccactgcattgcacaactgtgggggacaccattcacatagatgacagtgtgaatggctccccctggagttgtgtggttggtggccttggtaataacttgttcactggtgttctgatggcgcatgagatctttcttacagcagtgttcatactctgccttgtatcctgtactcaagtcctatttcctctactaggttatgaattccttgaaggaaggaaaagtgctttcttcatctttgtgtcctctgccagtaacacacaaagggattgttgaatggtcagatatcctatctgctggtttactgagtttgaggctctgtgacatgggtttatcaaccatccttttcctcacctaggcttccctccccctgtgctcaccctgcatcattcttgctagctcctgagaaaggtatctcctcctcaagtcacctctctgaagtcaaggccatgatattcattaggcactagaggcacaatgactaaataatatggtacttttcaggacctaaacaattttagagatctcaaaagaaaatggctttaaaacacaaaaaggcacaggattgaatataagtgtttgcacaaaggtaaaaccaaataatttgtcatcttcttcttcttctttttttttttttcgagatgaagtctcgctttgtcgcccaggctggagtgcagtggcgcgatctcagctcactgcaagctccgcctcccaggttcacgccattctcctgtctcagcctcccgagcagctgggactacaggcacccgccaccacgcctggctaatttttggtattttgtattttttagtagcgacggggtttcactgtgttagccaggatggtctcgatctcctgaccttgtgatccacccgcctcggcctcccagagtgctgggattacaggcgtgagccactgcgcccagcctgtcatcttctttaaatgttaaatttagcagtcattactgagaaatcatagaaaactgtaaattaaatgaataaccagctaccaaataatttttttaaaaagatgcaaaaattctttcaaaaatgttttgggcagaaagttatttttaattgggtataaatacaacttttaatatgttagatatggtatcagtgggagagcctccagaaaacgaacatacttgggatccttaaaataaactgtctgggtccaaaatgctgtgcacatagcccgtgaaatatttgctggattttaattgattatagttaaatgatgatggtcttttttgttgtggaaggaaggaagcatgggtattttacattattattttgttttgttttcttttatttataaaaagaaaaaggagttaagggaattttcccagcttaggtggaatgagtgccacattcctgcggagatattgagcaatctttggggcccttgaatggcaccagtaaggcccttcagagcactctgtcctggccctgctcttaggtttgcttgccacgctgtctggttccttcagaatgtaggaagttgggggtggcacagaagccccaagggcagtatgctagtgcagaggaagcgaaggcaagccattgccaggtgctgccagcagagcagagcgtgtgctttcgtgaggcatgagggaactgacctttccacttgcccttcacactcagggtgactcaaagtgctgacctattgttttaggtactgattatacagcgaacatgttgatgatatggtagaggtgtttcctcagcaatgagtgttgaatgtttaaagtcaagtagatttttggtatgcttttgctttggtcaagagggtcttcttttttctttctttttgtcttttggatattgttttggttttcattctgtagtataaattgcagtcccagaagctgaaattcacttccacctgttcaaaaattgctgtagactttagtgcttttactaactatgcataatattgatatgcccttgctgctgaaattttatatctaagattatcttcctattatctagccaggattcaactcacaccgagaaccaggatgggattggaattaaggcacattcagctggaggttagagccatagtcaaatgtgaaaatataaagcatattaaatatattgtgtttgtataatcattatattagatcagctataaccaccacgaggggaagttttttaaataagtggatttatgttatctgccatctccaaaagtttagagttgccagttaaatacatatatatttttcaaaggaaatcatcaaaaaggacattccactcttattacaaagctatgtcggataaatattttgatagatgtggttccgtgcacctgggagctgagacgtggctgagcctggagcagttagcacagatggagcactgagatatagcaagggttgggttttttcttatatatattgcaaatggttgattgagatagcatgaacattacattttccatgccactcagaaaagtagcttccttatgagaaatgatcttcttatttaagaatgataatgataatgaccatactaagacttttctcacaagtaaatgtataatggggtatgttacaatatgagcgttttgttaaataagagtactaattagaagcaattcagtagactggggtaagtaaggtcaagtctgcttaactttgtgtcggatataatgtaagtgtttggggctaggatatttactggtcctaagtggcaaaatgcgaaagatagaaatgcattaagatagaaaggttgctactttgatttttctcttttttgaatccgagttgaatcataacttataatttattaaaataatcaagtgtgtcatcttgattattaggaaataagcatccatatttaaaatgttgactgttcatacttgcctatctccttagtggatggattgcttgttaagtgacattataaaatcataacactttttccccctttgagccttaagtttgcccttaagaaggtggcattattttcattcctttgttattagcagaggaatgacttagtaaccccagcgcagtcatctatcctctctatcaatgagtaagaaatagtgtgaaccacgtaacaatgtgcatgttttttatttgtcattttttgttttccttttggactataaattcctcgagggcagggaccatctttatgttctcatctagtggttatcaaccaaatgttggaggactcactgccaagaaagtgatgattttctttaacaccccaaaagctgtcagtaaacaaatggaaaagatgattttttaaagctgcctttattaacataagcaagaacgtggataatatgagctagttagaagagttacagctccctcttccctgcctttgctggaagttggttcattgtaaacttagtcttgtgtttataactagagagaaacagacccaaatacatcctcagagagagattccataaattcagcaactgaatttgattttccagagtgtttctaaactaatgaaatgtcctttctaaaacatttacctaaaatgttctatggttgcaacatctgctaagcctattacattcttttattaaacagttttactgtcctctgtgcaaactgcttatttgaagcaataaagctgagttgactctggactttctaacaaacaggattgttttttaacagtgagaaaaactacatattcactatcatcatacttagttttgaaaccatctgttcagaaatgatcctattaatttaaaaaagaaagtatttgaagtccagctgattataataaaagtgatactgattctagcaatgcttttgacctctcatacacctttagttcttttgtttgggtcccagacaggagaaagcctttaaatgtctatagattctttaagacataggagtcaataacgattcactgactaatggaggaaatatttttatcacataagattcaaagtttggtaagggaaatctcattataaactggtgtagttaatctgtaactatatttggattgaataaacatgttagtaatttctcaaatgcatacttgcctccctgcctgctgccctacaaacctacagtcttcctgaatggtagcacagctgcacagaccacagaggttttcaggaagaaaactctgcctgcctatccagaatgggtcggtgaatgcagatgtcaccttttcttttttgtctacaacttttgtgacagttataagccgattaagatagctttaaagcgttcagactttgccactgactgtctttcttccttaaaacacatgagaaagttatagctagctcttttcccaactgtgcagaacactgcaaacaacagcatgggttattcatcttgaagcccattaaaaggatgttggcccaatttgtaatttttgtggtagtgctttaatattggagacattctagttttggagacaaaatcaatttgagatggatctgtcagtttactttgtcaactgaggcaaagataaaagttcagtcactaaatgactaaaatttcaacacattatacagcaaggttgccagaggagatcactgggtgtatcgagagggtgattttttttttctagagagggtcttgctctgttgcccaggttggagtgcagtggcacaatctcggctcactgcagcctccacctcccgggttcaaccgattctcttgcctcagcctcctgagtagctgtaattacaggagtgcgccatcacacccagctgatttttgtatttttagtagagcaggtattttgccatgttggccaagctggtctcgaactcctggcctcaagcaatcttacccgcctcagcctcccaaagtgctgggattacagacatgagccaccgtgcacggccgtaactttttttttttttttaaagagatggggtcttgctatgttgcccaggctgttgtcaaactcctggcctcaagcaatcctcccacttctgcctcccaaagtgctggatcacaggcatgagcaaccacaactggctaagtgggtgatttaagaatcttagaaggctccaatatacttcctaatctccctccatgctctgtctagctcgtagcttgcaaactctaactcctgcaggggccagggagggaaggaaatggataaaactggtcccattgaaattggtgagctagagagcaaataccctgtgtagtgttgcatcttccagtttttctagagaaatcggatgtttggattttttaatgtcatcccttaattttttttttttctttgagagggagtctcactctgtaacccaggctggagtgcagtggcatgatcttggctcattgcaacctcccccacccaggtttaagcgattctcctgcctcaacctcccaagtagctgggattacaggcgcatgccactacacccagcaaatttttgtatttttagtagagccggggtttcaccatgttggccaggctcgtctcgaactcctgacctcaagtgatctgcccaccttggcctcccaaaatgctgagattataggtgtgagccactgcacccggcaagatcccttaatttttaaatattagctattgattgaaatttgaaatgcaacgtttagctaaacaaaacctatttgcaggctacatatggttgatgcatcgcatatttacctctgctccacttactccttcgatttaagagttagaacttgtccttttggcttggggcttttgtcttttaattttcaaacggctgtaacctggagaaaggctgtacttcagactgtgtcaatgaagagttggtaatttccactgagttcaattcaggacagttactccccgttgtctgtgtataatatactgtgcttgggcaccagtaataatgctacacagcttatcccttcaaagtatctgttgactgtgcaagagcagtgttccctgacaccagtgacctgtgttatacacaatgccatgtgtaacacagtgtacagccctactgggcagttctggactccacttgaaaatatttttaccgaaattatggatggaaactatgagaatcgttctgatgagggcatctatgctaattgtaggaaggtagtctagcataattgttgaaagagcaagtcataaagccaaactgcctggattagaatcttaattgtgcttcttgacagctgtgtgaccttgggtatattatgtaacctctctgtggtttcatttttcacatcagtaagtggaaagagtaataatatctacatcatagagttatgacaatgattaaatatgacaaccttctatataaagctcttagcacaaggtctgatatatagtaaatgcaaagtaattattagccacttctgctgctattgtttttaattaagaaaacactgaacttagaatcaggagatctggggctaggcatggtggctcatgcctgtaatcccagcactttgggaggcttaagtgggtgatcacttgagtccaggagttcaaaaccaccatggtcaacatgacgaaaccccgcatatacaaaaattagctgctcgtggtgacctgcacctgcagtcccagctacttgggaggctgaggtgggaagtggaggtttcagtgagccaagatcatgccactgcacaccagtctgggcaagtgagaccttgtgtcaaaaaaattaaaaaagaatcaagagatcttggtttgggcacccattttgcctcttagtgtctctaaccaactggaaactgcttaattaacctctgtgaatatcaataagatcaggataacatgaagatgaaatgcaattatgtatcaagacacataaagcaatgcacaaatgaaaggtattgtttggtagcggggagggctgtccagctggggagggggcagtgccctcatgacacagcacagtcaacatgtagaccctagaggaacccagggcccattttgcctctttgtttcaactcaggcatttgatccacagcaagcattggactattactggctttagaatgactcaagtaggccgggcgcagtggctcacgcctgtaatcccagcattttgggaggccaaggtgggcagatcacaaggtcaggagatggagaccatcctggctaacacggtgaaaccccgtctctactaaaaatacaaaaaaattagctgggcgtggtggcgggcgcctgtagtctcagctacttgggaggcttaggcaggagaatggcgtgaacctgggaagcagagcttgcagtgagctgagatcacaccactgcactccagcctgggcaacagagcgagactccggaaaaagaaaaaaaaaaaaagaatgactcaagtaaacatttagagagtaaaaaaaaaaagaaaaaaaattttaagttctgccactttgttaaaaaaaatacccctgaaagacagagtatgtcttcgactctcacaagtcctttattagacttgctttggaagagttccaaactgtggctgagaggatggcatactgaggcacagctaaggctgccatccacttcagagaaggagggattctagcggagtcacatgggggtttgagactgaccaacccattggtctttgtttcagaaatgaggaaacagaaccagagaggttctatccttatcgaggattgttcaactgctgacctttcccctaccctaagatacttagactcagctgtattcaggattttcagttctttctctgatttctcacattttcaaagatatgccattcagatttgtttaggtatttttaaatcacttggaagaaaatgacatagtggatctgagagcacttacagcatttctgcaccatgttcagtacttgaatctgaatctaaagagagggctttattggatcactattctgggataatattgaaataacaactaataacaataacaacaatttttgttttgtgaaaaaataatacaaccaaatgaaaatagattaatcaaaacagtgaaaaccctgtccccttttctgagcttatgaaaagagaacctaattagtaggcattctttttatagctaatgtgctaattgcctcagagataacacctgtgtaatttatttttaaaaatcttacgaaaatctacattttagtgagattctaggaaagaatagcaacagctgggcccacatctgtttgaatgatgcggcatgaaaaggattctaaatatagtctgaattagaggcaaatgtactttcatgctgtagtacaaagtatcagttgaactagatctgaaggagcttatcattaaaataacctaaaactaaaatggtacagtttgctttggaaagcaacaaatatttaccttaagcagtctttgttagcaaacttgaaatataactggtccattcccacttgccagatggagagaaagattataccagagcttaggagaataaaaataagtcacatcgacacaagaaagtgactttttacaagaagttttcatcacattcagtggcttggggtgccttgtttctatttttcttagttcttgaattttatagagcctgagttagcagctctcaacagctctgccttcctccctcctcccctccctcccttccttcttttaacaaatacttacatgcccattctgtgctgggtattttttgtatatacccagataagaatagggtagccatagtttctgctctaatagggttttgaagactgacataacagatgttttactttaaacatgtgcatttaggtaacactgtacctataaagctcttagtgtctggcacatagtaagtatcaataaataacagcaacatgtgaaaacagtacaagaatctgtgaaacctgtaatagcagacccaatataatagctagcatttattgagcacctacagtatgctaagaattcttcatacacacgcacacacacacacacacacacaaagctatacacacagttgtatttaatcgttacagcattccaagggtacatcatattaccccagtttacagatgaggtaactgaagcttggtgaggttgagttgtccaaggtcacatgtatgtctcagtgactgtgccaggatttgaattcaggtttgacctgaccaaaacttgagcccttggccattaggatgtaccttggaatcccatttttacagcctccattgccacacactacccccgagaacagtccactagcagcacttgtttccctaccctccagtgcctgggagagttaatttgcacaccactgtcaataccttaccttcagggccccttctcaggatcacaagactaccagaaaatcaataggaattaatcatcagtgaaagccaaaggtttttacttcaatatgtattttcctttgtgttgatatgtctttacagagataacaccaccaccaaaaaattatccaatggtccatctcttccagatttgcccaatattcagagactccaaacaataccttttatttatttttttttttttttgagatggagtctcgccctgtcacccaggctggagtgcaatggtgcagtctcggctcactgcaacctccgcctcctgggttcaagtgatgctcctgcctcagcctcccaagtagctgggattacaggcgcccaccaccatgacggctaattttttgtatttttagtagagatggggtgttgccatgttggccaggctggtctcaaactcctgacctcaagtgatgctcctgcctcggcctcccaaagtgctgggattacaggcatgagccactgcgcccggcccaaataacatcttttatgtgccatcatacacatacatatatttaaattaagcattatattttacaagccactttcatgtccatgaacttgcttaagcttccctaagccttgtttatagcatctcttctccattttgtagatgaagaaactgaagcctagagcaaaaaaaaaaaaaaaaaaaattgcccaaagccaatagttaatttccagcaaacctgggacttcaactcagctctggttcctttgcatcctaagaaaatcatatgtgtgtggtgattgtaatcccctggattgggggctgtgtttgattgtttatctctgaacttcagtagacgccaattgggaggtgaactcccgatctcactgtaacgtgcctcctctgtagggtggttttaccacacatgtaagaagccttcacattaataaaatacagaatttggccaggtgtggtggctcacacctgtaatcccagcactttgggaggctgagggggacagatcacttgaggtctggagtttgaggccagcctggccaacatggtgaaatcccatctctactgaaactacaaaaattggccgggtgtggtggcgggcacctgtagtcccagctactcgggaggctgaggcaggaggatcacttgaacctgttaggtaaaggttgcagtgagctgagattgcccacctgcacttcagcctgggtgacagagtgaaactctgtctcaaaaaatataaaataataaaatcaaatacagaatttgcctccagctatctggagttgctacaagcccagtgccattgtttcatgcctgctgctactgttcctttccacagatgcctatccttgggacatacactgcttgattgctctcctggctagagataaccagaagctaaaccttgttaaaataaatgacctaagtaagacaactttctcctccaggaccttgccctttagttatctcttctttctgtatcatccatatcattagtctctgctggctttccactcaggctacaaacccactcaaccctttaaaatgaaacagacagaggagagagagattgtcccgtgtctagctaatgccccttctctcctttccctgtcttaaaagagtgttctgactacccagggaccacttgtttacttccatttactccttaacattggcagcccgatctcttccaccattccagtgaatcctctctgcagaatatctccagtgacctgcacattgccagttttccaatccatatcttcctaagtctctgtgccatttaaaatttttgactactcgacgctcccagatactcattactcccttgtgcgggatccttctcaactaactcctgtatctacacctaaatataactttttaggattatctctgtttttcttgtggagacagggtctcggtatgttgcccgggctcttcacgaacttctggcctcaagcgatcctcctgcctcagcctcccaaagcactgggattgtaggcgtgagccaccatactggccgatgttttaggattctcattctgggcaattgcgcttctttctactgacttttcttttgtcatttcatttattatcacggctgcagctcccacactcacctttatgctactgcgtgagctccctcaccataatcctgtccttactgcttctctgactgctgggacgtaacaggaggccctcagcctcaagataatttttttcttctgatatcagctcttcctcctgcattccctccctcaggtagtgcatcatacactgaaatagaaaacctagtcataattagactaacccccttccttcattcccagcaatcacatttcaattattttgcctctgagctatttctgttgattgattgattgcctatatctcctcaaattccttttaccagggatatttctcaaatctggcctctctctatgtcctggtcctttttcctggcaaatctctgtacttaacactgttctgtgtatctgaaactcttctctcactttggttgttgttactgttgacatttattcattcttatagacttatttcaggcctcattgcccctttagttctatgcatgtgtctttcttaacactcgagatactgtgtacctgtgttccccactaggctaggagttttttttaggacaagtcttttccccagtctttattttttaaatttatttatttttattttttgagacagggtttgcagtctcgccctagctggagtgcagtggctcgatcttggctcactgcagcctcaacctcccaggctcaaaccatcctcccacctcagctgcccaggtagccaggatcacaggcatgcattaccaccatgcccagctaattttttgactttttatagagatggtcagtgttgaccaggctggtctcaaactcctgagctcaagcaatcctgccttaacctcccaaagtgctgggatttacaggcatgtgccaccacacttggccttttcccccagtctttaattcatctttgtacttccaaggcctacagcagtacctaaaacttaccacatcctcaataaatatttgttgaactggatcatacttacttcctagagtaatcagaacacatgaaaagcattggaaacgggaactttggaggaaaaatataggcagttatccaaagtatcactcatgcagctgttgcaggacaactggatgttaacatgtagactctcttctgcctcccatctttgcgtttgaacatgtattgctaagtgcccctctctcagccaatctgtctctgtctctgctctcagtctgcccaagtcctgcttattctcttggactcagctgttggcccacctcagaatgggttagaggcctttcatccatgctgctgtgtctagcagggtacttatcagagggcattcttgttatcaaagggtttcctgtttccttgtctgtcttccccagttaactgtgagctcatttagaacagagaccaagtcgtgctccttttacattttcagtgtctgacatggctctgcttattaaatgtttgatgaataatgaaggaatatactttaaaagtagcagatgtttgtgggtgtgctgttactgaaacccccacctacctcgaatttaaagcttaggtttcctttcttgagtaggaccttaaaagccatgtattttagtttaggtgcattcaaattctggtgtctccagttagcagttgttaatcacactagctgatcaactactggtcttaaatcaaagcatttattatcaaagcctttttgtttatgagtacaaacacaccattgatgtttataagaataattattttctcccctgaatgttaactagccacaaaagctggtgtacacatgtgatagtgtttttcacggagtttaaagaatgttggtctttgatgttctgctcttgaatggaaatgagtctgtattacaaaatcactagtgaggaaaatggggaacttctagacaagcacctgagaagcattattagaattcctgagcattaaaatccaacagatgcatttttcatgacgttaaaaaaaactccactttctggtagtagcccatgtcttatgctacgaaaatgaatgagattaagtagaatatgttaaaatcatattaagtagaaatgtcttagtcaaaacgtgactgaaaggaaaagacactaatacaaggtagcggtagcaaaaaaaaattaataaatagaaaaaattttaaataagctgtaaggaaaaaggggtgtctcatgggaaaagggactaggaacaagaatctaaaaggaggcccttttggtctttctcagaccataaaatctctcatctctacttctttgcatgacttgcattttttttttctttctctcagcctggcttgctcagtttgcctgaccacctggcagaaggtagctacctcatagcattctaggttatgtatcctctttcagttcaactaaagagcccagacagaattagaatctctcagttacaattccagtctcacagaaaagttggttgaggcaacataggtaggtcacaagtccagtgtggtccaggcaactgtgatcaaggagacagagccacatgacacaaatatggttgccatggcacatgtctgaatgcaaagagacagttctcagacaggatgggctatcatgagttagacagacaactcctaccaccaccaaaaacccaaggaagcataaagtaaaaaggataatgtagtagcactatctcagtataaattatttatagatttattgtctttttcctccaccaaattatgtgtaccatgaggtcaggcaccataattatgtttaattctctagtacctagcagtgcccgacaataggcattcagtaaatattcagtaaatattggatgaacagaaactaaggtaagctctgccttcatgggaattatagtctggtcatgaaagcaggcagaaaacaagcaaataaaaagatgtaattgtggtaaatattaagaaagttaaaagggggagaggggtaaaggaagggttaccaaactacagcagaaactttcagaggtaggtgatggtgttaaaacccaaagtagctgtactaactttgcttattcatccgaagagactggaggtggtaatcataaaagattccgtttacattttgttccattcatcattttaacacataaaaaactagtttacattagagcatgggttgctaaaaggttgctgtaaagaactatataaaattttaataaatttaattaatgtttgctgatatcttttcatttttatcttccatttttaaattggtaaactcttagcctggagctcgatgtaattatataacagttctatgagctggtcaatgattaatcaagtgcacaataggagatatacattggccaactctgcaagcagatttggattaagattacaaatcacacaatgggaaagacatgttctccaaaggagaatcaggcaggatcagatgatacaccgggatgtgttttcagtgtgatggaaagattgtttccagtgatcttagtgatggtaaagatagaggagaagacacctaagaaatgtgtttttctggagttatattagtatttttgttgccagtatctaatagtgtttccagaactattctggaagcaagccagatctcctaaacaataattaacagagctttttacctagctttattcattagagtaactaacaggagtttctatataaacaactccaaaaccctagtggcttattaaactgtagatttttttcctatataaagttcagtgcagataaagggggtgtttgttccataaatttattcagggacccaggctctttccatcttgtggttctgtcctcccgcactcaattcattcaagctggtccatggggaaagaatgagattgggccaggactacaccaggaagtgcacatcacttccactctcatttcattagccaggattgagtcacaagtaccacacctacctacaaggagggctggacaaaggtatagttggggactcaggaagaagagagtattagtgactgttctcagtgtctgccacactagcaatatgtagattcaagaagctatgggaggaaaaaaaaaaaaggagaagaagaagaaaaaagaagaagaagctgtgggaggccagggggagcagtggctcacacctgtaatcccagcactttgggaagccaaggtgggtggatcacttgaggtcaggagttcaagaccagcctggccaacatggtgaaaccccatctctactaaaaacacaaaattagttggatgtggtagcacatgcttgtaatctcagccacttgggaggctaaggcaggagagtcacttgaacctaggaggcggagattgcagtgagctgagatcacgccattgcactccagcctgggcaacagagcaagactccatctcaaaaaaaaaaagaacctatgggaaacatgaaaaagaaaatattgtagaaaagccctttgtatcttcaaaagaattttgttgccaaaatttgagatcatttcagataagttatctctccaaaagcttcttaccacctgtagtgctgttggcttctacaaaccacatgtgattccctggttctgtcagtgctggaaaattcagaagaaaaataagagcaaatcgattctgaaaagtagttatttaatcagaatgggggtagtgtgtgctttcccttccaaagcacaactatgagttgcccatcaaagcttataatcatctcctctaggagtgttcctcaacatgaacgagtttcaaatgttggcaggtcatacttgttgaagaccccctgtagtctggagcagtatttcccaactaagaatttaggaaagagtctaattccataattttacttaaatctgtcccagggggcctggtttaggtctgataccatatgctcttgtccatgatgacagtagctgtgccccagctctgtttcagggattctgcaaatttaattatacaacaataatagcttacactgttgagcacttactatattctgggtaccattctaagaatgctattactattatactcatgtccgggaaataggatgctgccccaccttgcactctcagggatcttgtccattaatccacactggaagttacccctgcccaggaagtttatcaagggagatacaaacttggcagtttaagagggtggttcttattgttataaccaggactgacgaaaatttgaaggacataattgtatttttagatacctcagatttagtttggcaaatggctgttgtggtgctgaccagctttccccatatagagctaattattctttgtttatttttatttactgactccagtgggttaattttgaaatttatttgaacttggttcaataaatgatcactgagcatccactctgtggaaagctccatgctaattattgtagggaacacaaacaggaggaaggtttagtcatcaagcatactgatgagtagaggtaacaggattaccctaaacattatgaggttgctgagacttttgaagaccatcctgtaggtcttgaacctttagctgatgggttaaacactgaatgctgtgagagatgatggctttggagtcccaagttagacagttatatctcctactatctgatgtgctaatattcttctttataacagttttattaagatgtaatatacataccatacaactcacctacttaaagtgtgcagtagactgggttttgtttttgtatattcacagagctaggcagccatcaccacaatcaattttagaacattttcaaaaagaaatcctgtataatcctgtatctgttagcatttacttcctattttctcccaagttccccagctctaggcaaccactaaatctactttctatctctatttgctgtttgggacgtttcatataaacatgcatatgtggtcttttgtgactggattctttcacttggcataatgttttcaaggtttatccatgttgtagcatgtatcactatttcattcctttctagtgctgagtaacatttcattatatgaatataccacattttatatatcattcttcagttgatggtcatctgggttctttctgtcttttggctattatggatagtgctgctgtgaacatttgtgtacagtggacatttgtttttatttccatttctcgtggtatttatctcacagtgtaattgctgggtcatatggtaactctatgtttatcctttttaggaactgccagacttttccaaagggactgcgccattttacattcccaccagcattgtatgagggttccaattgctccgcgtcctcaccagcacatgttattgtctcttttttattgtagacatcctagtgggcatgaagtggtatttcattattttgatttgcatttccctgatggattaatattgtaatatttattttaccaatctagggctaaacttgcgatcgtatactttcttatgcacgtaatagaaactgtctcatattactggattgactttctaaaacaaaaccatagttctttacaaaatgaatgtcatttatggggttagaattatacgtgaaaaaacataaagtaaaatgacatggagttaagattacacactcatctgggaaatttgttttgcgctatgaattcattcacagtgttccgaggcctttatctgagctactcaagtactactatgtgacatttactggataatccagacagcactttggttaaatccacagtgtgatgtcacccagtaaacacttgaaaatggagatgtgtgtctcttctggttttatcagtcaagattagtggtggttcacagcacagtgaactttttctcctctgtgatccatcagtctgtgtctcattgtgggccaataatctgtcacctgaaactacttaaaataggttggactttcttgaatgtcgtgttgctgtgatgacatagggttttggctgcagaaaggaaagaacctttttataacttttgtttgcctctgtatcccttgtttccagtaaaagcactgtgatttttagccccttgcttatatatgtagactattttctaaaccagtttttcatccatctctttaccttctggggcccctaatctggtgacctttgtgtttctgtcaaagaaagaaaatgacacagggcttggaaggtgacagagtttcaccatcttggtttgaccaactagcagacaggtaaaaacagcatccaaaagggccatttgataataaaattaaaaaattaaaagttgaagagaattcagaggatgctttcttcagagaagtgcttaggatttctcagaaatctccccagaaaagaggccttaacagtagagtgatcatcctttctgaccccctgagagaataacacacaggtcggaattctcttcattgggctgcacacccctgtctctgcttagtacagctttgggaagttctgagagggacaaagggggtaaagaactgagagtggatcattaacccttcataatacatcatcccatgttctgcctcattggttccttaatttttagtgtgtgattgtgtggctcggttggggaatagttggaaggaatagttggagcttgaattttgtctcctccaaagtaaaaggaagcaacagctttatacatttatagagctggatttctttctttgttttttaagctctaatgaattctgttttgagcattctattgactaaaatattattttggatgaaactgaagcatatcatgacccaataataaccgttgcccctactgaagatcttaaactactgcataatcctgaaccatgtgccttcacaactattaaacaagaaataactaatatttattaaagtatgagtaggaattacagcttacagcttagattctgatctttgcactgattagctcttgattaattaaaaaaaatagctagcacttattaaacatttactacacgctaggcattataatagccttgcatagattatctcatttaatactttccatggccctatgaactaggtactgttattttcttctttttacaaactgaggtaaatttagtgttgtcatgtgcagtttgcacccttaactcccaacactcacttctgctgggtacatgacatattgaatgaatactatgtttgtaagagagagagaatatgcatgaatgaatgagagagagcatacccaaacagggaagcaaactgatggatttggctgtagtcaaattgttgttgccatggtcattttttttttttttttttttgaaacggagtcttgctctgtcacccaggctggagtgcagtggtgcaatctcagctcactgcgacctccaactcccaggttcaagtgattctcctgcctcagcctccctagtagctgggattacaggcatgcaccaccatgccaggctaatttttttgtatttttaatagagatggggtttcacacgttggccaggctggtctcaaactcctgacctcaagtgatccacccaccttggcctcccaaagtgctgggattacagatgtgagtcaccgcacccggcctgctgtggtaatttttaagaaagcttttaacatttccttttcctccttcgtattgttgcttacaaacataagacaataactgctgaggagaagcaaactcaaggctgggcattcctgcaggaaaatggccaaggtgtactttcgtggaataaaaatgaatcagagaatttgctaatttttttctcttaagaaattagaataaaaaacaacagtgcttatactgatttttctttaagaaatcgaatacctctgattacttattttgcatagaaaatatagagtatacttagaaattcaggaagtattttctttctcattgcaaacattaagttattcttagtcacttattcaattaaattgttacagtcacttcactgggccattttactgtgagatatcctaaaatcaatgaattcgtaacatctctgtcataatcacacacccatttttaacaacctgtatttcatattttcatgctttttagtcaaggtaaatgtctgaatataatgtaactaaagctacattcctataaaaatgcctggccaaaaggtagctcttcaagccagcagtcatctccaggataatacattgaatctgtagagcttattttacccagtttttcccctcccctgcaaaggcaattctttaatctgctctacaaagtctctacctactaagaagtcatctttggttgagggacctcctgggacaggcagctcattccattttcaaatagttctaaatgggggaaatggtttcctttgttcagccaaatgttgtcttctttaaggcctgcttctccacattagctcttccttctggaatgagacacagtaaaaactagggtgaaatctcttaattaacaaacacttaggctgtaatcccagtactttggaaggaccagacagaaagatcagttaaagccagcagttcgagaccagcctaggcaacaaagtgagaccttgtctctagaaaaaaaaaaaaaaaattaaagccaggcataatagcgtgcgcctgtagtcatagctagttgggaggctgaggtagaaggatcacttgagcccaggagtttgaggctacagtgagctatgattgtgccactgcactccagcccatcaacagagtgagactctgtctcaaaaaaaaaattattgattacttttacaatatgcaaagcaattatgaaatgtatcagaaaatgaatacatacacttcataatattaatgtggacaaataaacacggatgttgaagtcacatgatagcaaaaataatgctgactgggccaggcacagtggtgcaatgcctgtaatcccagcacattgggaggcttaggcaggtggaccacctgagatcagaagttcaagaccagcctggccaacatggtgaaaccccgtctctactaaaaataaaaaatttgcctggtgtggtggtacacacctgtagtcccagctactagggaggctgaggccagaggatcgcttgaacctagaaggcagaggttgcagtgagctgagattgtgccactgcactccagcctgggtgacagtgaaagtccatctcaaaaaataaataaataaaatagtgctgactacatgccaggcactgttgcaagtactttgtttaagttaactcattgatcctgaccacagccctttgaggcatgtactacaaaaatccccattttgcagatgtggaaactgagacacagttaagacacttgcccaaagtcacccagccagtaaacgtgagatccagcgtttgcagtcaagcagattgcctggtcccttagctctgcggacccagagccagatcttccagtgctgatgctgcgcctcattagcaggataatgcgggaaatttacttaaaccatctccacttttgtttccttatctgtaaaaacaggcagagttgttatagtaattaaatggaataccattgaacgtgaccagtggttcttaacagggattgcatatcaaattcatctgtgggttttttttttttttttttttttttccccagtttaggtcttaccaggaacttctgattcatttaaatactatgtggtttgttgtcaccagtttgagactcatgtcaacattggttcagaataagcagggtgatgggtgattttttaaattaatcctcttaataactgcaaaactcaggacagtgttagtattgatgggattaagtttggggtgatattaaaatctgatttcaaagtcccatagtagttgttcctccgatccttaaaatgaacttccttgcccccatttattgctgaaacatttttctgcatgcatacccaaggtagcacatttcatgaatagttgatgctagtaaaaaataatgttctgttattttcttctgtatttgataactcctttactgtgacccagtgaaccattctgaaagtaaacctttgaagtatttttatagcatcacctacacataatttgtatttttaaatctgtatatagtgaaatgcatgaggttatcaatagtctagttgatacaggattctcatcaccaagtatattggctgaatcaagaggagattctttgtcagtgtgctccgtttttaaaaagaaaggagcactctattcgtttcttttcacactgctataaagaatgaactgagactgggtaatttatacagaaaagaggctggggaggcctcaggaaacttaaaatcatagcagaaggtaaagagcaagcaaggaatgtcttacatggcaacaggagagagagcgagcaagaggcgagaactgccacacacttttaaaccatcagatctcaagagaactcactcactatgataggaacagcatgggggaaacagcccccatgacccagttacctcccaccaggtccctccctcaacatgtggggactacaatttgagatgagatttgggtggggacacaaagccaaaccatattaagcacccctaaggaaaatgtaacaacccctttaatgcatttatttattgggaggttggcaattcatttcactgagaataaccaaagaacttttggcttatggaaagagaatgccatgtagtttgaagactattattaccttgacctcataattttggctttctttttttttttttttttttttttttttgtcttgagacagagtctcactctgtcactcaggctggagtgcagtggcagaatctcggctcgctgcagcctccacctccctggttgaagtgattctcttgcctcagcctcccaagtagttgggactacaggtgcacgccatcatgcttggctaatttttgtatttttagtagagacagggtttcaacatgttggccaggctggtctcaaacttctgacctcaggtgattcatctgccttggcctcccaaaatgctgggattacaggcatgagccactacacctggacaattttcggctttcttgtactggaagtgggtcacttcaagggctgtgcctctttttttttttttattttgagacaagtctagcttggtcgcccaggctagagtgcagtagtgccatcatggctcactgcagtcttgacctcccaggctcaattgattctcacacctccacctcacctccacctcctgagtacctgggactatacctggctaatttttttgttttagtagagacagggtttcaccatgttgcccaggctggtctcgaactcctgaactcaagtgatcctcttgcttcagcctcccaaagtgcagggattacagacatgagccatcacacctggccctggctatgccatttagacctcgttctaagccatatcaaatgtgacaaggcaaattcagagattaaaaagttgtggtatctcagtaagttggcactgttccattcaacagtcatttattgagcatctcttattcgctatgccatggggtacaaagatgcgaagaacatcgtccctgcactgaagtttacagtctgtgggcagtggagtaggaacaggtggtctcaataaagttcagcaagtgtattatggtggaggaggtacaaggtgctttgagagtagaaaggaaggtggcctgatgtagcctggggagagaggaagaaagacaggaaggggctggtctgcaaaggctttctggggacaggagtactgagatgaatgttaaaagatggattaatgctagcagagtgaagaatggatggaagaacattccacctgggctctgtagcccgctgagcagtcttgaatcatcctacctaaccagtggtcatctcagttccaaatagtgtcctgtctgactcactgacgttccatcctatcattatttgactgctcagttatttctgtgtcacaatcattaactatttttgtgaagtatggcttcaaagagaaaacaaaaaaaactttgagccatgcctttttgtccctgaaatgaacaatctatgtgacccatttagcctgacctccatcataacttgagcaggattggctggggaatgtgctagaaccccagcagcacaggctggtgggaaagggggcctgaggaaaatcacctgcctgtacagtcggcatccagaaggggttgaaaaaccagcaaaagtgggacagcaaacagcgtcccaagtagtcatctaacccgaggtttccctggccaaaggtaatagaatgcagtggctcatggtatccagcatctgtcacatactggctttgtgacctttgcaaattcacctctcagtgcttggtcttctctaaaataagtaataataatcgtacctcactacatggaggtggcggtggggtggtggtgaggattaagtgaacttattcaccgaaagtacttggaagactttcttgttagttgttaggagacagcgtcccagttccttcagaaggggacccaggcacggtgtcaggacctctgcagttagtgagctcccattctccacaagacatgagttttccatacaagccatttttttttttttttttttgagacagagtctccctctgtcacctaggctggagggctggagtgcaatggcacagtctcggctcactacaacctccgcttactgggttcaagcaattctcctgccgcagcctcccgagtagctgggattataggcaccaaccaaccatgcccggctaatttttgtagttttagtagagacagggtttcgccgtgttggccagactggtctcgaactcctgacctcaggtgatccaccagccttagccttccaaatgctggaattacaggcatgagccaccgcacctgccccaattttttttttttgagaccgagtctcactctcttgcccaagctggagtgcagtggcacaatctcagctcactcaaattctgcctcccaggatcatgtgattgtcatgcctcagcctcccagagctgggattacaggtgcgtggtaccacacccagctaatttttgtatttttagtagaaatggggttttgccatgttggccaggctggtcttgaactcctggcctcaagtcatctgcccgcctcggcctcccaaaatgctgggattacaggcatgagccaccacgccaggtcccaatttcttttttaacacatatttattggatgtctcctatgtgctaggcactgttaaaagcattggggataaatcagaggaatcagtccttgcaaaggccctggtgtgggagttggcctggcacacgttccaggagtgacaaggaggttcccatggaatgagtgagggaaaggaaagtaggagatgagatcagagagctaacaaggggtggatgacacagggcttcccaggccattgaaggactttggcttttacttagaggttaatatggggtgagaattgagagaagaatgataactactgctgattattgagcttatagaagatagctggcactgtgctaagtgcttgacctgtgttatacttcttaatcagatagaacaagaagattagaacaatgatataaagcaaatggcctgtcccgagaaaggaccctgagacagaggggttggggagcgtgcaggggcagtattcaaacccagatctgagtgatttcatgatgtcatactgtcatttaatgaatatagacatgtgtttgccatcacattgctgtagcaagactaatcttagcctccacttgaccactctgcaagaccactgctcaggaactggataggaagttggtgcctgtgcctccaaacaactctgggaatccgggacaaagaatctgagcacacatcatgcaccacacacacattttccccagggcacggagcagggtaacgcagtgtccatgctgcagctccacactccccgcatcttctgtttcgcaagcggagagtcctcactcttgccatatttaaagactcagtgtttctgagtgccttttaagggcagggtagaatcaaaggccaaaataccaaaggttcagtttcctgttactgaccacagtagaccagaaaatgaggcagctttcagagtagctgcctccctctgtgaacctgcagttcagctttgactcaggagagcctgtgggaactgtcagactccttagtctgcaagatgttgttctcaactgaatggacacaccctaagtcaagttgtgtattcgagaccaaactgcagtgcagaacatgaagaacagacagaattctttggaattctgattcatttgcaggaccaaataaggacctacccaatgatcatcttaactcatgctgcacgaatttgaagtttgtgatgagtattgaaggaactaaactataaaataaaaggtcaggggtatccattttttccaataagtatataaattaactgcttattttgtgcgaagtataatactgggtgccaagaacgtcaaaataagtggcttctgcaccccctctcgctgtttaggaaaaggaggtaatttataagtacttacagtgcactgtaagtactgttaactatatattccaattgctgtacagaaattcaactccacatactcaacaaaaatggagagtaaaacagagaggaaatttaaatagtacaggtaattttgtccaccagtcccacactgtgcagaagatgacagggatgaatgattccctcagttgctctcagcttccctattgctctcatggtgtaaaatttcattgcatcaagtgtgattgtagtgtttaaagatatacattgtttgtataacgtgtccctaagatgcatgtcacctacttcttgtgctggctaaagaaacaatgttctttctagtgctaaaagaaatcctggttgtgtttgacctttctaagaaattgtcaaattggctttgtcatacatgagattttcatcttatgctttgacttcagagtttattctctacataagatattaattcactgtactgacatatatacaggataaagtcaaacgtggctgtgaatttcagtttttgactgatttagactgtggaaaagttatttgacttcccttagtgcttaatgattagcctcattcgactctaatctataaaactaagatacttaaattcatttcatttgcattgttgtgatgattacatgaataatatatataaagatcctaccaagatatttagcatagtaagtgatagttgccacctcattcctagtaggtgaagatgtgtactttacctatgggagcctgtgaaggtttttagcagaggagtgacgtgatccatgtaggtttcaggagagatgacttcagtgccccgtgatgtatgtgctaaagtgtagagagacccggggcaaggaaacgagacagcaagtagttacaatggtttagacaaagatgagggcctgcctgaaggcagtggaggtgcagaggaaggatccaggtttgggagctttaaaagtagaattgaggctgggtgcggtggctcacacctgtaatcctagcactttgggaggctgaggcaggcagatcatttgaggtcaagagttcaagaccaacctggccaacatggtgaaaccccatctctactaaaaatacaaaaattagccaggcatggtagcatgggcctgtaatcccagctgcttgggagactgaggcatcaagtctcatcactgattctcatcaagcgatgagaatcgcttgaaccctggaggcagaggttacagtgagctgagatcgtgccacctcatttcagcctgggcaacagagccagactctgaaaaaaaaaaaagagagagaaagaaaggaaagagagaaagaaagaaggaaagaaaggaaggaaggaaggaagaaagaagaaagaaaaaggaaaggaaagagggagggagggaaggaaggaaggaaagaaagaaggaaggaaagaaagaactgatagaacttggggactatttgaagtaaaagggagtgggaagatcttcagaagtgaaggatgtctttatgttttccagcttcagaggttggataaatggagatattaaattaactggtacagagaataataaaaggtactgttttacttcagactgaaactatatacctggcattaagctaaggaatttaatacattatttgatttagtcatcatgataaccctacggagtaagtagtatcattgccattttactactgtgaaaacctaaactcagaggagcccagtgtcatatagctagctagtcagtgtctccctaggatctgaacatggatttgtatgacaccaaagcctcactttacaccacagcagtaaataagccctcactctggaagaggagaaatggagtagggacaagaggctgaagagaagtcttagttctggaagcgttaaactgtcaggcagagatatcttgaaggcagctggaaaatcagacctgtagctcaggggtgcatgtggggaaataagaaaatgtgggtgttgctggcttatggtgttggagagtgaatgaggttactcatcaaggagtatatggttaaagagaaacagaccctcagtaaatgaaggctagaagggggatgccaacctagtttagaaactcgtatacctgcatactcagtttaggagtttagaaacgctcatatacctatatgcagtgtaattttttctgaccaaagtatagccttgtgctttggtgtataaatttttagtcagctgggtattgagagttccctgttagagcttgagccttgccctcacagagcttatagtctagtggagaggcttagtaaaaaatccattaaacaataacaatcagttgtagtacaggctaaatgttattttagggtgctgttacaggatgctgcataagattggccccaaagccaggcttgagagtcaatagccaggcaattaggattacaggtcatagtattgaataagtttatacttggccagacgcagtggctcatgcctgtaattttagcactttgggaggctgagatgggaggattgcttgagcccaagagctcaagaccagcctgggcaatatagtgagacctcccatctctataaaaaattaaaaaattagccaggtgtcatggcatgtgcctgtaatcccagcttctcgggaggctgaggcgagaggatggcttgagcccaggaggttgaggctgcagtaagccatgattgccccactgcactctaacctgggcaacagagaccctgtctcaaaacaaaacaaaaacataaagcttatatatattaaaaaaaaaaaactgagcaacagctgttttcaccactcattgtcccatcttgggccttactgcccaatttaaatttctctatctctctctctcttctccccacttcctccctcccttccccacacagtgaagagatatgatgcagctccactgtaacagtatttgagtcaaatgtatacactgaaatttcttagattttttttcctgaacacataattgctctaggagacctgcacaaaatgtgaaaatagcacgtttcttttccactgaccatcagaacagagaattcccaagccttcatattgcacagtgaataacccagtctcaatttatggactttatcttgatatccagtcttcattttggtaggttatctagtgtaatggttaaaagtacaggtcctggagctggactgtctggatttgaattcttgttccaccaattgctaactgtgtgaccttgggcaaaatacttaacctctctgtgcttgtttccacatctgtaagatgggaatataatgatattacctacatccttagcattatgtgaggaataataagttaatacatgtgaaatgcctagaactgtacatggcatatatagagtaagcaatttataaaggttcaatgttagtgctactactgaattatgccagtggataaaacagtgtgttaaaatgggagcccagcccattgtaaatcactcacagatcagctccctgttcacttaacatggaggaaagagtccagcatttgtttccttttcctctcttttaacattgtgggtaccggtccctggtagatttagtgggtagtcaatttcaagccccatagctagagacaaggaaatttttttttctttaaaatagaagtctccttctttccaatcacatgtgcaatgtctatgtttagaaatcttccaggagcagtctgggaagatagctgaaagcatggtgtatggcgagatgcctagtatatgataaagaagataggcaggcggccagccagccatcgtgttgtctgtttcataatgtgttgtcagatcagaaagggaatgtgattcttttctccgtggctgaacttttccatcagtcctgttgagctgccaattggaagaccctagttgatacatctcctgagcccatttgtctggagtggcagcaaagaacaaatcacagattttacaccttgttgtgaagccactgaacatcactctcactgagcacttcccctagcttgccctagagttctcagaatacctcccttcttccaagaggaagctacagggttgtaggcttgatactgttaatggaagaaattcatcaacttcttgaacctgcctctaaaaccccacaaagtagaggtataaaggggttttgactaagcaagtgtcgtttgctccctggaggatgtgtcagctcttgcttcttttcaattgcttaagagttaaaaacgattactgtggtctcagaggacagacaccagcactgtgagctggatctcacccacagatgtgttcggcttgacccacatagttgtatacgcatatgtcagtttgttgcaacatacaaaaactggggggtttcacataaaaatctgcattttcaatttcttttttttaactgccaaatctgacaacactgtgtcttccctgcttcccctgtggaaacagtctgcctgactgggtaacagtggctccctggtacccacagtttaccaggccccacctggcccacttcctccactcctgtttgtttcctagtctcggaggcatgggagtttatataaccttctcttagaacgtggtgccatgttctctacagtataatcccaaatgaaaagtgaaaattctcattacactccttgacctagttttaacaagatgctaaatactgagtctcaggcctttgctctttgatttaagataaaaaatcctaagtattttctctggatgttttggggggaaaaaatcctaagtaaaaccttttctgtgtcatttatttaaaaatcacaattggcaattatcctcgcctaatggtcttcttgagtcagagaagtctttttcctttgaccttttccatggtagcattttacgctgttctggttactaccagcaatacaggctaaacaacaacccaaagtttgaccatctggcctcgtccttagtcacctatttttgctgctgatagatttgagactataggttgtatctggggaagggagcatggagatctagaggggaaataagttacctgtttaacttccacagagttgaaagctgagtcatggggccacacgatacaaaggtgatacacacaaaagcatctgcaaattgcttttattgggaagccattttcctcccctttttcaagccacatggccaacccactccctgagattctgcaggcctcccattccggtgagtgtagctcagttggtgaaatctgccccagctcaagttcttccccaccttttactatttccttattctgaagatagatgaagaagtgcattttccttaccccctgccagccatctgaggacaatttgagcttgataacgtggggccagcgtgcagctgtccatgaaagaattgtgttatgaggccgggcacggtggcttacgcctgtaatcccagcactttgggaggccgaggcgggtggatcacctgaggtcaagagttcaagaccagcctgaccaacatggagaaaccctgtctctactaaaaatacaaaaaatttagttgggcatggtggcgcatccctgtaataccacctactcaggaggctgaggcaggagagaatcgcttgaacctagaggcagaggttgcaatgagccgagatcacgccattcaactccagcctgggctataagggcaaaactctgtctcaaaaaaaaaaaaaaaaaaaaaagaattgtgttgtgaaaccacagagtatacttactgcattgtagaagtttaatcagtgtataaaaattcattaagcactttaggagctttggataaaaagtcatatgtgaatattagtcatttattttattgccatcattgagtcactttaccatagaagtgttttattaagatcaggtgcagtggcttatgcctgtaatcccagcacttcgggaggccaatgggggaggatcgcttgagctcgggagtttgagagcaagctggacaacatagcgagacccctgtctctactaaaaatcaaaataattagccaggcgtggtggcacatgcttgcagtcccagctacttaggaggctgaggcaggaggattgcttgagctggggagatcaaggctacagtgagctatgatcacgccagtgcacttcagcctgggtgcagagtgagacccagtctcaaaaaaaaaaatgtattaattgttcaaatttccatgactccagtttcacatgaggccgtggacttctcaatcaaaaagtttttagtagcttcagtaggtctgaaatttcagagtattgagcaaggcctacactgagctagagcatgatctaataagattggactgtcaaaacaagaagcaccagtctgtggtcaaaaggtttttaagaaggaaatgttaaagctctgctgtgagaaactcaagatcatgaaacatgtaagctggcaggctgtttctttctcatttctactatgatggggggaccctcatcctaggtaaacagagacactgaagcaaaattaggtgtgattaaacagaaacaacagatggtatctttctattgggaaactaatcgtttgtgtaactggcaggatgaaacatcagaaaatacttgacacattttgctagagtcctaaagggcacctaggaagactgactccaaaatgtcaaaataaggaaaatacataactcagactagagtcagacagaagggagttccattcccagcccaccacctgtcagatttggggcaagttatttaaccttttttgctcctcagttttttttaatccctgaaatggggattggaattggaacattataggattgtcatggaaattcaaagaaagaatgagtggagaatgtttgaaagagtacctaccatatgatgagtgcccaatcaattgtagctattgcaattatgtaaaagagaaatgtgtaatagctttttgtttggtgtattcaatatggttttcaaaataaagaccaatatcataaagttttgttgctgtttctcataactacatttaaattcccggttactttaagccccctttttttttgtcttctgcatacctgcaagtacctcatccattcttccgtaatgtttttctcccttagccaataccattccaatgaataaatgctcaagaccaaatgtgaacagaggtttaggctgactttaggactgagtcactgtgatctgtttcagcctcctggagctcttttttcctccatgctcatttaccgaggagtataatgtttgcatcatacctgctgttgaattaccatgtaacgattaatgagatatgtttattaacaagatatgtttatgaaatgccttatgtttgtgatcacttgtaataaaacattaataaagaatatggtttattgatgaatatattagatcgcaagggggaaaacccagtgctaatgatgatctcacttttaatatgttagataattactccaactgaaaccgaattgatttttatcagataaattgggggtcaaagttacaccgcagtaattactgctttcaaactgtgtttgtgtaacctggggaaagattttgctctggggaccatattgaggcatttgcccttgccactagcagagaacttggatctgtgcacacacaactagaagcagaagcatgtatttcctttcttttaccaaagaatagaaaccatgaagaaaaccactctcctcaatactggatgaaattagacaccaaagaattccctttcactcagttctctgcttcatttaaaacctagaatctttgtagaaatctgtaaaaaaaaatgcgtaaattgtatagtttccttttcccataaaatctccaaagaaggaaatcttatttttaccttggactttcaaaaacatagataataaaaacatttcatttgctctaacacagtttatgatgtcactagaagttcttgataaaattgtcagcgtgagtatgccactgaattaataagccatgctttattcgtgatatgttgtgcaatatgtcagcatttcccctttctttcctgtaaattgtaacttttccgatgactagcatttaaagtcttttcctgattaaggaattgtcagctgaaatcatcagggatttccccttaactattttggaagaaatctgaagaatgtaatgtgttgcttggaaattaagaaatttggaataattcatgtgaacctaaatggtgaaatagaatcaagaaatgatagttttcttaaaaataagatggccaggcacggtggctcacgcctgtaatcccagcactttgggaggccaaggcgggtagattacctgaggttgagagttcgagaccagcctgaccaacatggtctctactaaaaatacaaaattagccaggcatggtggcgcatgcctgtaatcccagctactcaggaggctgaggcaggagaatcacttgaacctgggaggtggtggttgcagtgagcagagatcaggtcattattgcactccagcctgggcaacaagagcaaaactccatctcaattaaaaaaaaaaaaaaaaaaagaaagaaaagaaaagaagataatgataaggtcacagaaagaataataaaaactgtagaaataatgaactctctgagacatttaataaactttgatgtctctgttctatgcttttcaaaagatttgttacattataagagctaaactgaaatagaaacattaacatttcagatgcttagaaaatggtttttaaatttaatttctccagttactcaaggttaacagaaatttcttttataaatgtgtattgtggccgggcatggtggctcatgcctgtaatctcagcactttgggaggctgaggcgagtggatcacaaggtcaggagttcaagaccagcctggccaacgtggtgaaactctgtctctactgaaaatacaaaaattagccgggcgtgggtggcacacgcctgtagtcccaggtacttgggaggctgaggcaggagaattgcttgaacctgggaggcagaggttgcagtgagccaagatcatgccactgcattccagccgaggctacagagtgagattctgtcttaaataagtaaataaacaaataaataaataaatgtgttgcatctgcagtgccactagaacaaggatagcagactgaggtggtagaaagcagactcaacagggcaaaaggcaagagatctgtttcaagtgcaagggccttgagccttttgtccagtggcaggatggggtggggtgagcaggagacaggtggctagtgtgataaagagtacggggccggttggagaagagtcattagaaaaagcctctctgaggaagtgacctttgagctgaaccagcacggggagagcacagagaagaactcagcaaatacacagaaagcacatatcacatgcaaaggccctggggctagagtgaatttgatgatcaagagacagtgagtagaggatgggtcagtaggtgtgcagcaaaccaccatggcacatgtatacctgtgtaacaaacctacacgttctgcacatgtatcccagaacttaaagtggaaaaaaaaaaaagggaaagaaggaaggaaggaaggagaaagaaagaaggaaggaaggaaaaaaaggaaggaaagaaggaaggagaaagaaagagagagagaaagaaagaaagaaaagaaagaaaaagaagaaagaaagaaagaaaagaaaagaaggaaagaaaaaagaaaggatgagaaggcaggtatagctagagcacagggggagagtggtgagataagatccaaaaggtaggaagaggcagccctgataaaagtcaagtatggggagaaaaagttaacagttgagttaatttactgtgttttagaattatcccaattctaaaaatggcacgtggaaaacactttaaagaaggaaggatctgtatgccaaatctcaaccagctgtaagctccaaatttgtatttgatgacagacaggccttactcttggtaactcttagaaagagaaggacctcacgacttgccagcttagctcttttgttgtcaccttccacataaaggagactgaagcaaaggaaaagtgtcctcaaaatcggtcatcctgtgccttctacatccaccctcagcccccatgtatgtgttacacacgtccttagagtttccttgttccccatactcttccgtggacaaagtgtgacactgttcagtctggtggcagagaagggaaggaaaaaaagaaacagaactttacttttcttctctcaacagactttgcagaacaaaatgaaaaatcaaagggacccaaaatgatagatctgagattcagtccaccagctattacaactaaatagtggcagaaagcaactgatgctttcttactctatcttccaaccaagaccccctagaaagccctgcatgagcaactttaggctatctggcatttccaggatagttatttagaataatggaaagtgaaaaagattggcatgtgtttttcaaagaccggtaatcaaataggatagcaaacgtgcagagatgtgaattgaatgaatgtaggagatgatttgttcaaaataatttagcaactagaagcaaagtctttaatgcttaagtggatatctaagcagcaggccaattcctcccagccattaaaagcttatacaaatcccataaatcagtaatgtgctttttaggtttgcagtttcctttcaaggagccttgtgttttgtttttgttttgtttttgttttgttttgttttgtttttgttttttgagacagaatttcactcttgtcgcacccaggctggagtccagtggcacgatctcaggtcactacaacctccacctcccagattcaagcgattctcctgcctcagcctcccaagtagctggggttataggcacccaccacccatgcctggctaattttttgtatttttagtagagacggggttttgccatgttggccaggctggtctcgaactcctgacttcgtgatccacccgccttggcctcccaaagtgctgggattacaggcctgagccattgtgcttggccgagccttgcatttttagacactcgatcactccctgaaaacaaccaagccaggtgatggttgtctaccagtaatattttttcacacctctggaagtggagctgtgatcctgccagtagctttctttcttgatgtaaatactgtgtagggacttgcaggctttcattcaatctcttttcattcattcattgtgcaccatgcctgagcagtgtgccagctcttggtgatagagcaattaagtaaaatgctggatgaagccctatggggagatgggcaaagcatgagaagtactagaatagcagagaagtaaacaaagcgagatgttgggtggaatgggagcaactaattccagcaagggagggtggggatcaaggaggacctcagagatgtaactagactcacactgaagggtttaaaggaaggagatataattaggcacaaagaatcacataaggcgaaacagacacagaataaccctgcagagcatgttttcttcatcatgacttttctcattgactagaatcttttttttttcttttttcttttcatgtgtgtttgtgtgttaggaacagagagaggagttacagggatagagtggtagggacaggagaagtagataggtaaggaatgtcaggccccaagtaccaaacagagtagtgtatgagcttcagtgtcagaaagacctggttgggccttaggctgttcctttacctcagagccccagcttccacatcagcaaagtgggaaagcttccatttgggttgctctgagagtgaaatgaggtgcactgtagcacagtgaggggctgagttttgagtcagacagacctgctttcaaatcacactgacttcttgtattagctgagtcatcttgcgtgtcaaaacctcagttttctcatttatgaaatgggaataataggatctccctcatgggcatgtaaggattcaactagctaattcatgaaaagtgtttattagtacaaggctgggtgcacggtcagcaatgttagctttccctctccttttaatagaaccttgctaaaggttagttcctttcccctaaggaaatgtaagagtttgccattttaagtccttcagtaatttattcactgtaactgtacagagaaagagtatgactttttagcaattatattttccatggaggagtcttccattcaggctcaccacattgattttcctttgttggtaccctttttttttccctctctaagtcagggtttcactccgtcacccaggctgtagtgcagtggtgcagtcacagctcacggcagcttcaacctcctgggctcaagcaatcctcttaccttagcctcctgagtagctgtgaccataggcacacaccaccacatccagctaatgtattttttgttttttagcagagacgagctctcactgtgttgcccgggctggtctcaaattcctgggctcaggtgatcctcccatctcagcctcccaaagtggtgggattataggtatgagccactacacctggtctaaacctcattcttatcaatgcatgatgataacaaatgccatcccagggcaaacaagtgaatagcatatcttctttttcgattctagtctcctaatttgaggtagtttctacacagttttcttaccttcaacagcacatacttaagaactcaattcagaacaactcaccttctatatataaacttagtattgtgagaagcatatggcccaaggccttgctttcaagcagctaactgccttcttgggaaaatagaacttccagaaaacaattaggcaacaatatgaagaaagtgtatgataaggtacaaagtctattccaactatgtttatgacactactggcagtacgtgcattggtcagaagctggaattttcagggcaggctccagactttaggaactatgttatgatcaaccagcaggtcttagaataaccgttgtctgtctgtctttctttctttccttctttctttctttcttttcttttctttctttccttctttcctttctttatttccttctttcctttctttatttccttctttccttctttccttccttccttctttccttccttcttatcttccttctttccttccttccttctttccttctttctttccttcttttccttccttccttccttccttccttccttccttccttctctctctctctttctttctttctttcttctttcctcttgctctgttgccaggctggagttgaagtagcatgatcacagttcactgcagactctacctctcagactcaaggaattcttgcacctcagccccccgagtagctggcactataggcgtgtgccaccacacccagctgatttttggtttttcgttttttttttaagagatggggttttgccatgttgcccagactggtcttggacttctcatctcaagcagtccacctgccttggcctcccaaagtgctgggattccaggctggctcaccactcctggcctattgtttctgatttcacatcatcactccaccttcccagaataccctcaagatgagtccatcctgggaaaaaaataagactatgatttaaagtcagtggtttcctaaagatctttttttttttttattggagacagggtctcactctatcacccaggctggagtgcagtgatgcaatcacagctcactgcagcctcaacctcctgggcttaagtgatcttctctccccagcctccgaatagctgggactacaggcacatgccaccatgcctggctaatgtttgtattttttgtaaagatggggttttgccatgttgcctaggcttgtcttgaactccagagctcaattgatccacccgccttggcctccataagttctgggattacaggcgtgcaccaccatacctgaccaagattccttttttaatatatacttcctccctcctccatgctttgaaattcttccctaccaaattgcatttacacataataatttttgtcttccatgttttattaatcaaagacagttgcctatctgaagtctaggtcagcataagccaatgtgaactcagtatagcaacactattatctgattccaggttacaggggagaaaagaaactagggtatttcacttgttaattatgcatttgagatataaagccttgctaatgtcatgtatgtatacatccagaaaatatgcaaaatctagaaaccatgcagaaaaagattgataatttgaactacatcaaagcaaaaattatcagaccagaatgccagttaaatttttaaaaagttaaaaaattatttatgatatttttagatgccctcagtaaagtcaaaagacaaactatcagctaaagaggaaaattgtaatttatgtgatagaggattaatttcctgcacaaaatcttacaaatcaatgtgaaaatgacaaaccaatattctacaaaatgaaagcacatagtttcagaaaaagcagtaccaatcaccagtaagaatataagatgtttaactttacaaaagaaatgaaaataaaatagggccgggtatagtggcacacgcctgtaatcccagcacttcaggagcctgaggcaggtgcatcacttgatctcaggagtttgaggccagcctgggcaacacagtgaaaccccatatctacaaaaaatacaaaaactaaccagatgtagtgcctgtagtcccagctacttagtagggctgaggtgggaagatcacttgagcccaggaggttgagttcttggtaagccaagatcgcgccactgcacttcattccagcctgggcgacacagtgagaccctgactcaaaaagtaaaataatgtttacctatcaaattggaaaagatgtacacttctgataatattcagtgttgcaatctatatatggggaagtagccaccttaaataatttattcaacatgtaagtccacacatagacccaaaagtatgtatacagtgatgttgatggcaacatctattgtatcagccaaaaactagaagcaaaccttaagcttctgatcaagattaaataacaggtaccacattgaacttccctcctaaaataacagagaaaaaaaaagaaaacaaaatctgtgaaacaaccacggcactcaaggcattgacatcaggcatggaaaggcaatgatccttgaagacaggaaacaaaggaaatgggtcccatgcttgttccagcttactattgagagagttttcaggccatagtacagggaaggggaacctaggcagatccttgtgatctccctgaatggaggaaatataactaagagtccagggaagccaagatagctagactagagtagagagatgcacaaagagagaaatctggagatgtgaggaggtctcctgaatactgatgagcacatgcatgtgaagaaactacccaaggccagggaaagagctatctaatggattagagagaacagtgcctggaactcacacagggatgagaatagtacctgttctcaacaaccagaaaggaaagaaatccataattcagagacattggttacttttgcttcagtagtagaaaaaaattaaccatagattaaacaccactctggtcatcctgagcacaactttaaaataagacccaaaagcatcaaactgtttccaaataaataactgcatccaagaacaaaactcaagaatgtttataaagaaaacaaaaataaacagcacccacaatgtctagattccaggtaaaattaccaggcaaacaggtagcaggaaaatacaacccctaataagggagggaaaatcaacccatcaaaactgacctagaaatgacacagatataaaaattaataggaaaggcattaaaacaattattgtgattgcattccatatgttcagaaaactataagaaagattgcccatgttaattagatacatggaaggtaggtgtgtgtgtgtgggcagtgggggtgtatgtctttacatatgtaaagacccaataaaatgaaacctacaatggctgaaatttttgaaaagataaaacacacaaactggatgggattaatggcagcttagacactgcagaagagaagactagtgaactggacaacacagcagtgaaaactacccaaaatgaaataaaaaaaagaatcttaaaaaaatgaacagggcaccagtgaactgtgggacagtctcagggagtcaaatatatgttttagtgaagtctggacagtctcaaggagtcacatatatgttttagtgaagtctccaaaagaagaaagctatgaggagacaaaaagatttaagaaaattgtggctggccaggcgtggtggctcacgcctgtaatctagcactttgggaggccaaggctggcagatcacctgaggtcaggagttccagaccagcctgaccaacatggtgaaacgccatctctactaaaaatataaaaattagctggacgtggtggcatgcacttatagtcccacctgctcaggaggctgcggcaggaaaatcgcttgaacccaggaggtggaggtttcaatgagccgagatcacaccaccacactccggtctgggcaacagagggagactccatctcaaaaaaaaaagagagagagagagaaagaaagagaaggaaggaaggagggagggagggaagggagggagggagggagggaaggaaggaaggaaggaaggaaggaaggaaggaaggaaggaaggaaggaaggaagggaagggaaggaagggaaggaaggcaggctgaaaattttccaaatttcatgaaaactgtgaacccacagttttcagatttcacaaaccctcaaagaaagatacatggggaaaaaactacaccaagggatcttacgatcaaattgtttaaaatgagtgataaagggaaaacagcaaccaaagggggaaaagaaacattatgtataaaataacaaatataaagttgacagcagatttctcaaaaaaatgtataaagtaaggtagaagacagtggaatgaaatttttaagttactgaaaggaagaaaaaactttcagactagaattccatacccagcaaaatatattttttaaaaaaaggtgagacataaagattttttcagacatacaaacaataaaagaattcatcaccaacaaacctgcattacaagaaatgttaaagggaaacccttcaagaagaaagaaaatgatgcagtattagttctcatactgctgtaaaaaaaatacctgagactggataatttctaaagcagagaggtttaattgggctcacagttcagtgggctgtacaggaaacatgatggtggcaactgctcagcttctgcggaggcctcaggaaactgtaaatcatggcagaaggcaaagtgggagcagacatatggccagagcaggaggaagagagaggggctacgcacttttcaaccaccggatctcacaagaactctatcatgagaacagcaccagggggacggtgctaaactgttagaaactgcccccatgatccagtcacctcccaccaggccccacctccagtattggtgattacatttcaatatgagatttgggcaaggacatagatccaaaccatatcagataccaagtggaaacctggatctacacaaagaactaaatgataaagatcatcataaatggtaactacatgaatacacacaggattttttttcttaatattctaacctctgtaatcattgagtttttcaagcaaaaataataccaatgtttgtatcatatgtaaaagtaaaatgtgtaacaacagcactaaggctagcagggagaaatggaattatactgttttaaggctcttacactatagagcccaggcaactggcttcgtggtgaattctaccaagtatttaaggaaaaagtaataccaagtctacagaaactctgacagaaaactgaagaatagaaaatattaccccaaacattctacaaggctagcattaccctgatgccaaaaccaggcaaagttattataagaaaaagaaaattacaaattaatatccctcataaacatagatgcaaaaattctaaataactttttagcaaatggaatccaaatatatacaaaaaagataatacattatgaccaacggggggttattccaggaatgcaagattggtttgacatttgaaaactaatctgtataattcaccatattaacagagcaaaaaaagaaaaatcaggccaggcacagtggctcttgcctgtaatcccagacatgatagtcagtttttgttgttgttgtttttgttatgtttctttaaactttagccatcctaataggtgtgtagtggtatctcattatgattttaatctgcatttccctaatgactcaggaggttgagcatctttatgtatgcttatttgtcacttacatattttcttttaagtgttcgttcacatcaatatttttttgtttatttcaatatcttttaagatcttttttccattttttggattttgagttttaagagatctttttatattctggatatgacctcaaactgaccactttgggaagctaaagtgggagagtcgcttgagcccaggagtttgagaccaacctgggcaacatagcaagaccgtgtctctacaaagaaattttaaaattagccaggtgtggtggtgggtacctctaggtctagctactcgggaggctgaggcaggaggatcacttgagcccaggaattggaggtgacagtgagttatcattgtgccactgcactgcagtctgagagtgagtgaagcagaaagaaggaaaatcatatgatcatctcaatagatgcagaaaaagcatttgacaaaatccaatactgattcttgattttaaaaatgctcagcaaacagaatagaagggaacttcttaaatctactaatgagcatctatgaaaagcctacatataacatcatacttcatggtgaaaaactgaaagcatatcccctaaggaaactagcaaggatgtctactcttaccacttctgtttagcattgtactggggttcaaacaagtacaataaggtaagaaaaagcaataaaggcatccattggaaaaggagtagtaaaatttgcagataacatgatcatctgtgctgaaaatccaatgaaatctacaaaaaagctgctagaactaatacgtgagtttagcaaatttgaagaatataagactaattaaaaataattatattcctatatactagcaacaatcagaatttaaaaattttaaatgccatttatgatatcatcaaaaatatgaaatactgccaacatggcaaaaccccatctctactaaaaatacaaggagtagctgggtgtggtgacgcatgcctgtgatcccacctacttgggaggctgaggtgggagaatcgcttgaacccaggtttcggaggttgcagtgagccaagatcatgctgctacactccagcctgggcaatagagtgagactctgtctcagaaaaatatatgtatatatgaaatacctatcgatgtatctgactaaaggtgtgcaagaactgtctactgaatgcaaactgtgagaaatcagagacctaaattaatggaaagatataccatgttaatgaattcgaaaactcaatatacttaagatgccaattctcaccgaattgatctgttgattcaaagaaaccacaatcagaatcccagcaggggtttttttgtagatattgacgagattattctgaaattcctatagaaacacagaggacatacagcatccaaaataactttggaaaaaaaaggacaaagttagagaacttattctacctgacttcaagacttaatgaagctatagtaacaagggtagtgtagtaagatggacaacagttaaataaatcagtggaatggaatagagtccagaaatagatccatgcataggcagccaattaattttctactcacatgcaaagacagttccatggttttccacaaacatgcaaagataatgcagtgagaaaaggacagcctttgcaacaaatggttctgtaacaatccaatattcatatattcagaatataaactttgaaccatatctcacaccatatgtaaaaattaactcaaagtggatcatatatctgaatataaaacctaaaactatagaagccctagaagaaaacataggagaaactgtgaccttggtttaggcaaagagcaatccacatttttaaaaattataatttagacttcatcaaaattaggaacttctgttcttcaagagatactcttaggagaatgaaaggccaagtgacagtctgggaaatgttattttcaaatcacaaatctgataaagggcctgaatccagaatagtaaaagatctctcaaaactcaataagaagaaagcactcccaaaaatggaaaaaagattttgaaaagatactgaaatgaacaacaacaaaaaaactaacatgaacagacacttaaaatatatagatgacaagcacatgtaaagatgctcagcctcttttagtcattagggaaatacagattaacactataatgaaataccactacacacctattaggatagttaaagtttttaaaaacacgacaaaaactgatcataccatgtgttggcaagtctaggcagaatctgagtctcttcacactgctggtggaaatgtaaactgatacaaccactttaaaagttaaacatatatgacctaggcatcccacttcgagatatttattcaagaccattggaagcatgtgcccgcagaaagacttctactacacaaatgttcatagcagctttatttctattagttcaaactggaaacaagcccaatatcccgtaactgataaatgaatagacattgtatgtcatatccacagaatactactcagcaaaaaaaaaaaaatgaggactattgatacatgcagcaaggtgccagaccaaaaaaaaaaaaaaaaaaagagcatatcctatgtgattccattttgataaaattctttatgatgcaaattgatgtaaggcatcagaaaacagatcagttgtgttggagttggggagtagaagcctgaaagtgcagaggatagggattactaagggcacaaggcaactttgtgaacaatcaacaaatattcactctcttgattgtggtaatgattgaacagatgtgtacattatcaaattatatactttatatgcatagttaattatatattaattatgcctcattaaagatggggacaggaagctacttacttaaatgcttattatagtctcagttactcaggaggctgaggcaggaggatcacttgagtccgggagttcaaggctgcagtacactatgatagtgcctgtgaatagccactgcactccagcttgggtaacatagccaaaccccgtttctattaaaataaaataaaataaaataaaataaaataaaatgtgtattgtcaggggattaattagatgaattctggggtctcactctgtcacccaggttggagtgcagtggcacgatctcggctcattgcaacctctacctcctggctcaagtcatcctctcacttcagcctcctaagaagctggaaccacaggcacataccaccacacctggctattttttttttatttttggtagagacagcattttgccatgtaggctggtcttgaactcctgagctcaagcaatctgcccgcctcagactaccaaaatgctaggattacaggtgtgagccactgtgcctggcttaagcagctatttttaaaaatgaagttgggtgcagtggctcacacctgtaatcccaacactttggaagaccgaggcaggaggatcacctgcggtcaggagttcaagaccagcctggccaacatggtgaaacccccactctactaaaaatataaaagttaactgggcatggtggcgggcacctgtcatcccagctacttggtagtctgaagcaagagaatcacttgaacctgggaggcggaggttgcagtgagccaagattgcggcactgtactccagcctggacaacaagagtgaaactctgtctcaaaataaataaataaataaaaatacccgggcgcggtggctcatgcctgtaatcccagcactttgggaggtcaaggcaggtggatcacgaggtcaggagatcgagaccatcctggataacatggtgaaaccccatctctactaaaaatacaaaaaattagctgggtgcggtggcaggcgcctgtagtcccagctactcgggaggctgaggcaggagaatggcgtgaacccgagaggcagagcttgcagtgagccgagattgcgccactgcactccagcctgggcaaaagagtgagactccatctcaaaaaaaattaaaataaataataaaaataaaaatcaagtcatcctatatgtgtcaataggaaatgatcccccaaataaattattagatgtaaaaatgcaaggtatttgcatatctctttgagtaaaaataggcattatatatatgtgtgtgtgtgtatttgtagatatgtatgtgtgtgtctatttacatatatgtatatatagtttgtgtatatacactgtgtgtatgtgagggatttcttgagcatatacaaaagcttacagtggttgtttctgagaattggcattgtgggattgtggaaaagagagagaggacttctgattttattcacttttgttgaattttttgaaaaccatatatgtgcatattcttttataagtttaaaaagaagattggttaaaaagataaaaaaggcgggccaggcgcaatggctcacgcctgtaatcccagcactttgggaggccgaggcaggtggatcacctgaggtcaggagtttgagacaggcctggccaatgtggcaaaacaccatctctactaaaaacacaaaaattagccggtcgtggtggcgggcacttgtaatcccaactactcgggagactgagtcaggagaatcacttgaacccaggaggcagaggttgcagtgagctgagatctcgccactgcactccagcctgggtgacatgagcaaaactccatttcaaaaaaaaaaagagagagagagagggccaggcgaggtggctcacacctgtaatcccagcactttgggaggccgaggcaggtggatcacctgaggtcaggagttccacaccagcctgtccaacatggtaaaaccccatctctactaaaactataaaaaaaaattagccggcgtggtggcgagcacttgtaatcccagctatccaggaggctgaggcaggagaatcgcttgaacctgggaggcagaggttgcagtgagccaagatcacaccactgcaccccagcctgggcgataaagcaagactccatctcaaaaaaaaaaaaaaaaaaaaagagagagaaaccaaaattgggaactataattgaaatataattactgaatgaatgtagtataattaccaattgaaaactatatgactgaaacataatccagtttgtttattcatctgagtagctgctgtctttttaggaggctttaaagataattctgggttagaaaattgatgttgtgggtttgtcccaaataactaaaatattttacaccttatttcttgatcagattaaagtaagagagtgtttttttttaagtctttaatttgagctaaaacatctaccattttgtagtatgtgagagctatagacaagagagagggtaggtacagaactaaggaggctagaagtctttgtccatacaggtgttgggcacagaatataaggaaataaaaggtgttaaaagtaagatttctttagaatattacaggacttgaaggtttgacctgaagtactccatttctccaatatagtataagtaaccacaaaatatatgtatacaattgttttaggatttaaaggcatgactgtattaggtaactaattaccatagggattatcatgaatgggtttacagagattcttgacatctctaaatgggtctgaatagattaatatcaaggtaatctgggaactccctttgaaccttttgaggttagtatatattaaagagctcctcctcaataaaagattgccatattcaagaactatcataattatgggtgaggttttctagcacaaggaaaatcattttttaaaactgtttgctttagtgagactaacatttgaggaaatagtactggccatttttccaggttgtatagtcacttttaagaggcaggcatcatccaaagacttctcactggccttttttttttttttttaacagattcttaagttatgacattgaaattgacagtcagaatcatgtccacaagaaacaatattctaaacttgatgtatgaatcttcatgatgcctctgtctttagaaaatttttgaattgtttatgaggtcatgggatggagctaagtataataactgtagtctccatttaagaatcaattttcatgcctgtctcatcagagtctagtgaaagaataaaagaaaggtgtataaaagcacatggagagctatgaacgtgcaaattgctgagcacctcgagggcctggattgggttgtgtgccaggcacaaggagtatcttaacacacgttttcactggagtagatctggacaccaaggcctgctggtttcagaattcgctgccaagccagaggatgagtagttctctcatgagagcccaactcagggattttcaaaaatgtggtcttgaggattctccacatgattcacaggctggtgcacaaattctcaatgtgtagtgttttatttctggcatgaatcagtgatttgctatctatcatcggtgtttcatcagaaacagtagcaaccttttcattcatccctgtcatctgggtctccactttctgtttttttttctgttttatttttagtggcaggggagttataatcttaaaatgtcacagctagaaataatatccaaggtcatttagtcccaaccctctcagagatgaggaaacatctagtcactgtttcagtgagacccgaagtcagaactcctggcccccagttcagcaccttcttggctgcctgcatgaggcctgtcccatcagacagtctgcagaccaaggaaatgtgagcggcagtgtccagactcatccaagactgagttgtgaccaagacagctactgtattagttaagatgtggagaaaaccacccttgaatcatgttgcagcaacatcaaggtaggacctcatgcttggtaaaatccctacctgggaaaccaagatctgaatgacagcaagaccagcctgacctcagtccccagcagcgggcaatccttccttaccaggttatctcagtgagactttaattaggatgttcttggatgtgtttaaaacctggcacagccttgcagtttcagcccaggtcctttcaatctggggacagcaggagctcccactacaggagctttttggctgtgagcagggctcctatcagcttggctcttcagagctgtcacaaaacctggagaccgccattgttttttgatatcctgtttcctttctttttagttaccaagaagatttccttttgaacaagcatcatgttttgtttacattgagggttaggtgtttatgttgatgttttagttggaatccacgtctgcctttagttatagacaacctcattgccagcagatcttagtcctcagcaacacacctgtctagcttgttccgatatactgggacaaaccttgggagtctgggggccctttttaatcttgtggctccatcacagtagagagagtgataagtatggcctctgggatcagacttattagctgcctggcaaatatcaggccagtttacctctctggacctcggtttcctcatctgtaaaatggggataatatttgcaacctgcctcatagagttgttgtgagacacattgtgaattaattcacacagtgttcactcagttcaaggcctggtagatagttagcactcagtaaactgacaggtggccatggaggtggtggtggtgataccatgtagtaagactggttgttattttttttgttactatcacttctctccagccccctccgaaagaaccatcattacctagaatcattgaccctgaggttgggagttaaagccaaaggtgggtaagctacaggaggaaggggtatgacctaggaatgggagggaacaggtagctttacagattcggggcacgtcgctttcagaaggatggaaacaaggctgccttcttgttagggaaaaacagaactaactttttcttttttcttttttttttttttttttttgagacagtctctctctgtcacccaggctggagtgcaatgggacgatctaggttcactgcagcctccatctcccggttcgagcgattctcctgcctcagcctcccaagtagctggaattacaagcgtgtgccaccacacccggctaatttttgtatttttagtagagacagggtttcaccacgttggccaggctggtctcgaactcctgacctcaagtgatccacccacctcggcctcccaaagtgctgcgattacaggtgtcagtcaccatgcccagcccccagaactagtttttggacacaccatgaagaagtgtggaaatctcctgccctcttgccaatccccaacctcagggaggaaggctacccttagagaaacacagatctgctctgaggaatgcatgggccaaaaataagctcgcacctgggcaactccagatttcattccatgcctaattacgtttatttcttaagcctcgaatgtacgctaggtactaaaggaaacagaatttagagctagctcttcccaataagaagcaggaggagtgggaaacgccagaggctttggaggagtgatgatcacccaacattgcctcccacaagcacgtggcctggagcacttacctccctctaggccccagctgtcaagtgtggggtttggactaggtgaccacagctcctttcagttttaatgtaatgcagagtccactgaaagagaaactcaaactttgttccctttactcattagatttttgtgttaccacctctttcacacacatgatgtgaaaaaggtggtattgtgtcatatattaagaaagaaaggtgactgggcgcggtggctcacacctgtaatcccagcactttgggaggctgaggcaggcggatcacgaggtcaagagatcgagaccatcctggccaacatggtgaaaccccgtctctactaaaaatacaaaaattagccggacgtggtggcaggcgcctgtagtcccagctactcgggaggctgaggcaggagaatggcgtgaacccgggaggcggagcttgcagtgagccaagatagcgccactgcactccagcctgggcgacagagcgagactccgtctcaaaaaataaaaaataataataataataattttaaaaaaaggtttctcataattttgaacaagtcattagatgtctgtgactgtttcctcacctgtaaaattgttatcagtactcagggccctccctcatagggtgcttgtgaacattagataataaaaagattgtaaagcactgtgtaaatgtcaagtgctgggtaatggggaagagtaactgcaggcagggtaggaaaacttagcatgggaaagatgaaaactatagattttctcctccctgaagtttaaaaacgatctttttttttttaacaaaataaccagattctttttatacacttttctcttaatgcttcagaatagcacagtttggggactgccttcaaaatcagaccacattgttagaagttatttcactgcttcagaacccaaatcccctgcaaggaatgtaagagcaacttactttctttcaaatttcagtcaacggtaaagtttcagcgtatagcatggtccacttcttgcaatcacaaatttactttgcaggggtaaaatttcggaaggagcagtggaagaagtctggtctgggtacttcttgtaaacttcagtcagatatggcctgtgcaagggcaaacagtagttccatatttcatttatttggcactttctctaaggagattaaagctgctttgtggacttaatctatttaattctcacaacatccctgccatgtaagtagctgctatcaccctccttctgctgatatgaagcccacagccagatatgaaaactggcttttcaagggcacaagcaaatcgacatcaagaacaggagttgtactctaaattttatttattatcctcttcccatttgaataaattctcctaaataaagcaaatttgagaattattttgccagtcaccgatgctaagtcaaaatttgagaattctataaagggcatatttttgtctctaattcatagattcttagaaaattggcagatttgctgagtcttcctcttcactgttagatattctagaaattttgaccttagatacatgaggtagtaagaccatgctaatagtattgtatggtttatggagtgaaatatacctgggcttggctagctctgtgaacttcagttttcattcaaatgtgaataatatagtactcgcatcagagttgtatcaattaaatggtgcaatgcctataaaatagttagcgtagaagctggtgcatagtaagctttcagtaaataatagtcctcatattacaaaacaaacaggttcttaggttagttctttccttgttaagattttcattgaatatttaagctctagtcaagctaatccagatatattacaggttttcttttaaacagaatgctttgtacactgctatagcaagcttgttccatttttctttcccctatccccttcagggttccattttggttacaagaagcttgctcagggagaggttcctgcactttagcttagatttctgtcaaaacaagattacctctttagttgaccctgtgagaagccatttagtcttatgaaccaacctttgatttcaaaattctttgagttgtcctgaatgtggtaagctaccctgcaatgtgcttggaaatcatccagtttgggacctcaagagagagggataagatgatctaatcagttttggaacttggaagagacagagttgtctgagtggaacactgagctgtgaacccagtatcatagacattgattgttgccagtgagcttcgttccaaaatgggggacccatacagaaaataaaggtgtcttggtccccactccagacctgccgaatcagaatctccaacagtagacctaagaatctagatttctttttttttttctttttatctttttttagaaacagagtctcgctctgtcgccaaggctgaaatacagtggcacgatcacggctcactgcagctttgacctcctgggcccaagtaatcctccccattcagcctcccaagtagctgggactgcaggcacatgccaccatgcctgggtaattttttattttttattttagagacagggtgtcactaagttgcccaggttggtctcgaactcctggcctcaagtgatcctcctgcctcagcctccagagtcactgagattacaggtgcaagccaccacgccttgctagatttctttctaatgtagttttcctggtggttcttttttttttttttttttttttttttttgagacggagtctcgctctgtcgcccaggctggagtgcagtggcgcgatctcggctcactgcaagctccgcctcccgggttcacgccattctcctgcctcagcctcccaagtagctaggactacaggcgcccgccactacgcccggctattttttgtagttttagtagagacggggtttcaccattttagccgggatggtctcgatctcctgacctcgtgatccgcccgcctcggcctcccaaagtgctgggattacaggcgtgagccaccgcgcccggccttcctggtggttctgataccaccaagtttggaaccactgcgaggccatttcccagatgaagaaaataaggcccaaggagaggagtacctccaccaagatcagtggcatgctgaactcatgaatggcagaggcctgctcagagctcaggtcaccctcacagtcagtgcaggtttttttccactactccttcatgctcctgggtctgccgtggactcaggataaacagacaaagttgtctgtgtctgtactttctcatctgtactgtagagataataactcctgaccttaaagggccattgtgaggttaaattagttaaagggtgttcagttcactttgtcctttactcagagtctgttctttagacaactgaaagggtgctaaattaagccattttgcagagaggtctgagtcatctagtggcagctgtctgtgcctcactggaggtgctttgatcattgtcatctaaatgcatgcgttaagtactatctgtagcacagcgctccaggctgtgctaagtgagttacccagataatggtctctgcccttgagaacagcgctgaggcaagggacataaaggttattcacacagcaacagaacaggggatccatgaacgttgaattcagagagcctagaaggagcatggggacacccattctgcgcccctggcttagaggaccgaagtgctgcagctcaggtcacatggcacgttgagagcgggatgtgtgacccaccaaggctgagtccttcccacctccccctgctggaggggaattgtttttctcacgggttggaatgtagcaagtgtccattatagtcaatctggaaaggctttagtttggagttagtttcaaggatgtcttgaaatgaggcggttagagctcagaggatgactttggggatggtgggcagactatgtgtacgaaggattgggccaaaaaagattatgaagtatcttttctttttttttttttttttttttttttttgagacacagtctcgctctgtcacccaggctggagtgcagtgacctcccaggctcaagcaatcctcccacctcaacctcctgatagctgggactacaggatgtacaccaccacacccggctaatcttttatttttttgtagaggcggagtctcactatgttgcccacgctcatctcaaactcctggcctcaagcagtcctcccacctcagcctcccaaattgctgggattacaggcgtgagccgcagtacctgaccagattgcgaagtatcttgaagcaatctggaaagaagtcttgaagcaattcttgagggtgttttgtaccacagagtgaagtcccaacaggactctgagaaggaagccacccactcagaattactgccaagggaggggctgtaatgacacatgatggagtgaggaggtatgggaagcagctctggagggttaaggaaatcattgccaccatttttaaacagcgattatgtgccaagccccatgtttagcgttttacataaaatgcctttatcctcagaacagccctaccagacaggtattttcatccagacaggtgtttcccctgtgcgtatgacaaaacgcactcaaggtgattaggtaacttgctcaaaaacacagagggactgaggcaggcagtatttaagcccctgctggatccttccaaatatgtctgctacaccttaagccctctctaagaatattagagatagttatggatagccagccaggaggtaactaaaaatttccattattgtctataaacaaacaaaggagcaaaatgggggtgatactccatgcagtgagggtgggaaaaccacacaagctctctcagtgttctgaattatgcccaagaaaggatgagcagaaatgactaaggttccttatttgacagatcattgacatggtgacgtgacccagtgagatagaggagatgaagaatttccaaagaaagataagcatatgtcatttatagtaagagttactgatgattagggtgtttaagaactaggcattgctcaaccaaaggggaaagttcaaagtgaataggtaggttggtgtgtcatctaaagagacgatatagtgtcatcaagtgagatagagcctcagaaaacatcacttttggatctgtgtatatatgacattgtactaagacactgtagcatggaagtgaatagataagaattaggaaaatcacaagctaggagaggacagatgttatcacacagcaccttgtaataaagggagaagagtagggaaagttaagcctgacaggaccccactcctggtagaaaggaaccattgatatggctttgaagataggaaggacagagcattgaggcagaatgtaaaagcaaacacctctagtatcatggaatccagggaagaaggaaaggaaaggaagagaagacctgtgagcattttattatgtgctgggcatattaaataatcaattactcaattaaattcaattcaatactcagttaaatactcagtccttacagtagtcctgccagttaagtcttctcccattttacagatggggaaactaaggctctgagaggtggtcattttcccgagatcaaatagctaggggaggcaggattgtcccaggtctgactctgaatcccttgcttctgccacactgcttcagccagaagttggagaaggggaaggaggattggttatatgcagagtcagaagctatgagaggatgatgaggatcagagtggatttggagaagtgatgaggatatgggtggctttgttgggtgatactgctgcagagtagaaatgggagaagttggctacaaggaaattcacatggttgggttcacagtttcatctgccatgtgtggcattttactacctggtatatggaagattaaatattagctgcatttaattctctctttggagaactgcgagttcctttttgaacaaattctttgcaagcacttctagtctacatagttgggcttccaggttgatgcatcttcagattatagttccaagaaaaatactgactccagtgggtggtttttcacatttttaaactgatcagtcctattggcaacgtaggcattcatccattcactcccatctgggaactatgggaatcttctcctccagctaacactgtgatttggtcatctgtgtttagtaatatcccaacatctcatcctcttgcctttttcagtgacataggcttcttattgtttgtgaaattatgggtttgcatgaattgcaactaatggtagaggtctttgaaaaaataattataatttgagaaaatggggttagcctatattaggtttctgtagtcttgaggtacggaaagaatgggcaaacatttgccctttaaagtaggtaagagtccatagcacagtaagaagtctgtttcctctcactgggaaaacatattccagccactgatttaacttctcttattgttgctgacttgcaaccctacaccccctctaagtctatgacaggtctgaacataattcttctttgtagtccattgactcttataaaataatgctgtgattataaggtttcctgaatacaattttcagaatgttagtaataaccacattgcacctacctgccatacttgggcaattatctctgttgctcaatttacttaatattggtcatagtgaaacatgttttcatcacttgaaatcctaattttatttgccagattactaatggccacctatttctgtaacataaggtagaatgttatgcaagtttgacttgcaaatactgtatgttgactctagaaaacaacaggtttggccgggcgtggtggctcaagcctgtaatcccagcatgttgggaagccgaggctggcggatcacctgaggtcgggagtttgagaccagcctgaccaacatggagaaaccccgtctctactaaaaatacaaaaattagccgggcgtggtggcacatggctgtaatcccaactactcaggaggctgaggcaggagaattgcttgaacctgggaggtggaggttgcggtgagccaagatcgcaccattgcctgggcaagagcgaaactctatctcaaaaaaaaaaaaaaaaaaaaagaaagaaagaaaacaacaggtttgcctggagatggcagcataaggagtcatttttctgtttctttttaagatagtctgattcctctcaggataaaatgttgataatgattgaaaggataaagcatttaaagctggaatggatttttgatactagagagaccaccctccttctaattctcatcccttttcaggctggagaggaaacaaggtggagaaaggtggtatacatgatgtgacctcccaggtcacatagctgactagtggcagagccaggaactttcagtcattctggtgccctttccaccaaagcaccattttcttctaaatggcaaacagttgtcttgaaggcactgtctttttctacctagatgttgggtggaaaaaaaaaaaaaagctgccttttatatagaagttcttgggaatatttctcatatagtgagatgaacagaatgcaaaagtttcttcctgcaggatctcccaaaatcctcttggcttgaattttcttctcacttttcttttgaaaagctttgttccttttgcaccttggaaaaataagtcttgtttgtcctgacagcagagtgcaagcatctattgcatcaaaattcccaagtggaatagaaaaccaatggtccttttctgaatttcgttagcagtagcaacaaacatttcatcataacctcagaagcaatacagagaagaaaagaaaaatcaagttagcaattacagctaacatcatgcaagatgaaagcctggcattataaaatccttactgttgtaaactctactttacttctggatctgtctgcaggcagcctaccctttcaaaattcagtatctgttgtcagtagttgggttataaatgaaatttattctaggagtaataaatatggtatgcatgatgaaactgaatgattatggaaaaggtttcttgacaaggaccgaattaggctatcatggtgcttctgacatcttagcatctcagtttaggccaaagatttctaaaggattccctgaaaactaaattcacgctctgccctagatttacagttgacatgaaggtcaaggatgagcaggctggggagagcacaaagtgcctcatcacaagatgtgccttaccctgagacatcctgtcaaaactgttctatgttggtaattcacatggggagaggatacattttaaaaagctctctggcaccttgttgctgttggaggaagggacactgctctgcagtgtcttctgtcaggtctgccttgagtcctgtccaccctcaattttctctcctcagcttacagttctccaaatgcacctggtctctctccttgggggctggagtgagctccccacactgcttgggacggtccttttcctcaggagtccactgcagaagctcgcagaacttatcccttgtatgctaatggcactgtctgccccaacactagactagagtcctttggattgggggctctgtcttgtttatcttggtgtatgcagaacctaccacacatgagaggcacacagtggtgagcgggtggttggaagaggaagcatgcaggcaagcttctgtatagcttacatttcaggagacatttaaataatcataatcctgggaaaatattaagtaacattagaaaagctgcctttcagatgctcctattccctagtgtatcataatggacataatgaggcatttgtacatatcattagaattgctgccttcaaatccctccactaagaatggcagagtggcagccgtgctttctctcacatttttgcctttgctcatcctactccttctccttcaggattcctcccactgtcactgtgcctccagtcattttaagaagtccttggtgagttcccgtggccccctgagcttgcctctctcctggtgcccgtcacactatgctacagtcgtgggtttccttgtctatttcaaccccatcctctgtgcctgggaaatgggaggtggtcagcagacatttactgaaggaaagttgcatgagtcataccttgggctcctgaatgaggaagagaaaataaattttctttaaattttgctcctgatcctgggaaaccataagcctccgacgttgtagtttttttttgtttttttttttttttttttttgagacggagtctcgctctgtggcccaggcgggagtgcagtggcgcaatctcggctcactgcaagctccgcctcccgggttcacgccattctcctgcctcagcctcccgagtagttgggactataggcgcccgccatcacgcccggctaattttttttttgtatttttagtagagacggggtttcaccgtgttagcctaatacagcatgacgtttaaccatatttagggctgcaagtttgagttatccaaccactgtgaaaatgctactcgactgtcattgtgaaactaggttaaaatttcaaagccaatgctctttaccgtttagtgacaatggttagttacgtttcttggccgtctttgtattacttctgaaaaataaaataactgaattagctctgaaaaatatgagaaacaagtcctatttttagtattcccttctcatctataaatctgttgtaaattgaacatatttgactgcattttattctctttacttgttcctgctttgccattttgatctccttagatgctgaattatatttttggaatgaaatagtcattggcttttttgtcattagctattttactatttaatttagaataaaggacagaatgataaaattagatacaagaggccactgtgtgtcatcaagtaacctaatctacttttggtaacgaaaataaaattctctttaaataattgctagctcattttgaaccagctttgttcagatgaatagccctcagtctgggtgaagaggatgagaaactcatctctccctcacaaggtctttccaacaattaaaattatccttttctcaatttcattctattgctcctaattatgaccctgataattagtgtgctaattacatcccctgcataatttctctgcctccttgatgttcacctttcatttatttttagcctgcctcctttatttgctcctgaattccctgcttacgtgttccctcactgggcatgtggtcgggggcctcaaattcagagagaggctttcccaatcactttaaccagtcacctctccatatttttttttcttttgtcttaagggaatttttagctaaggaataaaagtgtagttagagtaactggagagctgcaatccagccttgtccttctgcgatgctgcgggaggggcactcattacttggtgtgcactcactacctactgcaagacccagatgtcattcacatgccaggctgtagattatgctagtgacccaacagcatcatcttcattatggggtgaggaaggtcactatttgggatctttatattttcctgtagagttcataaagcaagttctgagagtctttttcttctctctttttctcctttcttgcttcctctgttttgtcccgcttacaactgcaggtagtatgtacactgtagtgctaggagtcaggcccgtaggctttgaaaatgcgaagcaagatcaaccagtcaccctgccttgccctttcaggaactatttccagagttctccttatgtggtttttgttactgcgttgattcatctgttagttttttttttcctctaatgagggcaaaacacttgatcccatcttcacagtatcctaatgatacagagaagaagaaagtgatagcctacaggaaatttgacacctatcccccaatttatggtagagccaaggtccagacttaacctaccctcccgaagtccattcttgtatgaaactacagaacagttgtctctgggtcttgcagagcactcctttactcctttgcagaagaggtagagagtgggcagaaccaacttgaagccaccaaggaccctttaggatcgagagtccatgtgcaatgcactgaggatctagaaatggaaaaaaaaaaaaaaaaaaaaaaaacctgtctctgcccatggagcttacagattagtgggggaaacagccacacaaacagataattatgaatgatgtgtttgatatgttaattgcctcaggtggtgggggggttaaggggagactcctggggacccctgagtgagaagttttcctagaggaaggcagtggccttgataaaatgccctcctggactgcttctcagcactctatttctgtgtggcacagcctaggctcatagacatcacattctctgtggttctacttgtgctcactcgtaattgtcacctgccctggaatatgtgagctttcagtgagaaagaacatctgtccctcttgacacctttgggtgtgggtaaggaaaagagtaaatgttccatgctaagcatattgtcaagcactgtgaatgtcatgaaggaggaagtttgaaaagtgtgatttcttcatgtttacaaaatgaacaaatgactcagatctgttgtacacattcacaagagctgtgtcctaagctgatcctgattttgaagtcatgtgtcttcctttgcatgtggggaggattttaaagggatggaaagtggacaaggagggggtgggtgagaggaaggaaggcttagaggcaaggactttgttctacgatgctgactcagtgatgccttcccttgggctctgcagaaataaagattttcctcatcttttagctccttccttccctcctccctccctccctctttccctccctctctcttactttcattttatttcttccttccagtcagcaggtttttgtggggtatgttttctgttaggctaacttcagacaagaccctgaaaactaagtacagatgtcatcacagatgagtgttccttactcttggaagttcaggtagccctgcctcgattggctctgaccactttgtcaggccgtggagctgagctacattttggggatttcacccacattgttgttgacaggattgttaggcttcactagatttgcaccctcaggctttgatctttttaatatcttccggattgaatacccttttgggattgttctcctgactttttttttaaacgagtatattgtgccactagaaagaagaatgtttaaatggatcaaaaataaatcttgatactctctatcaaatgcatgtaaaaaggaaaaacaagcatgtttcattaatactaagattccagggcatctggtaatgacagcgctgagtaaatcctatggggcgacatatttgattagattcggggtcagtgggtgaggggacatactccagtcattacaatctgaggacagcgctgagcactaacagatgtgacaacttataacacaggtacttcctccttcactgcactttatccaaaaatagacatcttcagaggttctttaccttttagccttaaaggatttgagaagctttagaaaacaaattatgatatcaggtctagatttattttgctattaaagtctcacattctgtacaagtattttattattgtttgtctaggtctctgaaattagaagagacagaagaaaacatattatataaatttaaagtatgaattagccaggcgtgttggcacgcacctatagtcccagctactcggggagctgaggtaggaggattgcttgagcccaggaggtcaaggctacagcaagcccagattgttccattgcactccaggctgggtgacagagcaagaccctgtctaaaaattaaaaaaaaaaattaaagtatgacatataaccttgtaagggatccaagaagtttaaaatattacaactgctgccgggcacagtggcttatgcctgtaatcccagcactttgggaggccaaggcaggcagatcacaaggtcaggagattgagaccatcctggctaattcggtgaaaccccgtctccactaaaaaataaaaaaaataaaaaaaaattagctggacgtggtggcgggcgcctgtagtcccagctactcgggaggctgaggcaggagaatggcatgaacctgggaggcagagcttgcagtgagccgagatcgcgccactgcacaccagcctggggaacagagggagactccatctcaaacaaacaacaaaaaaaattacaactgcttttaagataatacatctagaaaatacaagggattgaaatggtgtcatagccccatcttacccaaattgaaatgttgcagttttaaagttgagcaattgtaaatcttaaagttcccttttttactatgatgatctctggactttatttcatcatttgtttcaatttgactaattgaataaacaaatccatccaccctcattgccgtcagtcctacttacctcatcaatattatttggtctcttgaagagtactagatataaaaagctcaagctaaataattactctccaaatatctcagaaatcttgattcctctactcctagtgcaaatatgcagtagttatgtcacccacacaggatggactgcaacatttcatcatctattccttcaatcttttttctatataccattgtttaagatgaatcatggccggtcacggtagctcacacctgtaagcccagcactttgggaggccgaggtgggcaatcacctgaggtcaggagtttgagaccagcctggccaacatggtgaaaccccgtctctaccaaaaatataaaaattagccaggagtggtggcatgcacctgtaatcccagctacttgggaggctggggcaggagagtcgcttgaacccaggaggcagaggctatagtgagccaagattgcaccactgcactccagcctggctgacagagcaagacttcatctcaaaaaaaaaaaaagaaaagaaaattaattgtactacatgtacattttaatttcagttttttcacctcatgtaatgtaagcatttcctcatgttgaagattatttttaataactatcagattttttaaaaccaggaaaattctagagaaactgagattttgtgagtcataattctacagttctcttaaattctcagtctttcagatatctatacttctccaatgtttctctattataaaaacaacagtaattgaatgtctgtcccaccttggtaaagtcaacaaacttaaaaaaaaaaaaaaacctccacatttttgacagccgattactactgtacttctgtacttttctggggacatagatggtttctggccagggaatagaatcagaggtgatcgggggcgtagatggtttctggccagggaacagaatcagaggtgatctaaatacgtatgtggagtagtttatttcttccaccaatgtgacctccgtcgtctttctttttggtaatttgcttttgtacagaagtggaacagagaatgaacaatggtatgacctacacggtataatgtggctttctttctggaaaatcagtaattaactcaaggaccaaattgtcttattctaagatgtttgtcttcaaaacaatcctcttcactattttcatcttcttattgtggtaaatttgtacatgacagtattcaaagcattctcttacttcagcaaccattcgtttatgaagttcctgtacattgcctggttcactgagaacatgaagctgaatcagacagttccttcccttaaggaatccacattctggtagggaagatagagaagtaaacaaatgattacagtaggtacaaaaggtaccctggagtcctgaggaggactcacctctgctttagcacctgacagaggaaatgcctgaattgagtcttggagggtggtcagagattgctaggtgaagagatagcagcagaagcacaaactaatgtgctaaatatgggtgaactgtagtcagtctgggatggatatgggggataggattgaagtgagtagagtaggagatgaggatacttactctgggccaactagcgaagagtcttgttgtcatgcttagaaggccatggtcagccaggcatggtggttcatgcctgtaatcccagcactttgggaggccaaggcaggcagatcacctgagggcaggaattcgagaccagcctgcccaacatggcaaaaccccgtctctactaaaaatacaaaaaattagctgggcgtggtggcacatgcctgtaatcccagctactcaggaggctgaggcaggagaatcgcttgaagccaggaggcaaaggttgcagtgagccaagatcgcaccattgcactccagcctgggctacaagagcgaaactccgtctcaaaaaaaaaaaagaaggccatgtcttagaaagatgaccagctggaatagaaagaatagactggggagactgaggcagagagctgaataaagaacttttttcagtaatccaaattggaaatgttgggggtttgaagtaggacagcagcagtgaaaatgaagaggaggagacagactcaagataaagatggagaatggacaggctatacgaacaacttgcatgtactgtcttgagtacctgcacaggtggtacttacaactctctaaaataagagaatgtaagaagatgagtgcaaagggcgctccttaccttctgatctttgctttcttcagactttactgaggatgtaaataatggaaaattgtagaccttctcaatgctggctaatcagactttccctattatttggttttcctagttcattacccagataaaagaaatagaatgtgtgcattagattttctgcttctgcttggtgacctagagatgatcatcaagccttttcttataagaggtattaaatgcaggtgctcagtttgggagtatttccagtatttattggtttgaagtggatattgtatgaccaaatcttaactgacgatttttgtcctaccagttgaatgtgctgggttttgattattttaaacctaatatttggacagtatttaatagctggaggcaaattaataacatgatgtcagctgaggacaaaggacatgtctgcaacaacagtagataaattataagcacatgataacatgaaagggtatatcttactaaaatgtcagctcatttggaggaaactcttcattcagtttactttcaaaatcttcagaggagtgtgtcgaaagagccatggaagtggaagcagacagaaaaaaattgaagatgttgatagtgctgtgtcagctatctacagcttgctatttgccaggaaccatgctaagaacttttcatacattaactcacttaatcctcagacagcactatgaagtaagtaccattagtatctccatttcatagctgagaagattgagacaaagaaagatggagtaatttgcccaagagcaccctgctgataatgatagaaccaggcaaatccaagcaggcctctttccagagcccatgttcctaaatactgtaatcctcattgtctcaatatccttccctcttcttatcacacctccctggagagcctggctgagtcattaccttcttctaggaggctcaccttgactcttcccctacctccagagatacttttgtactttgtacaaaatgtatatatttcactgatcacacaggatataaatattcatatctgtctctcctaccagacccgatcttattcctctttgtatctatacctggaatttggtgtagtgcatggcacagagtaagtgttcaataaatgcaagtctagttgagttagcttcacttaaacacacagtgcttgtcctcaaagagctttcaatgtatcaggaaaagaaagttccattcacatgaaacaacagaataagaaagaagtttgagctaaaagagtgtgggtatagacagtggatattatgagatttcaatgaaaggagattggctatggagattgtgttgggtggattgagttgcattgggttagattggatagagatagcttcaccacgtacatagaatctgagatgaggatggattatagttaagagaagaaaaggaggaagaacattgatcagaatgttgacctgaggtggcaatgaatgaaatgcttacatttaagggggtggtagagttgtttagaaaatgtacgctgaaagatcttcctcattgagccagatcagacatcagctccttagagaggctgaccctgttctctctcgagaccttccttccacagtatcttgtatatgcatgaccttcacaagaacactttgctttgtaggtgtctgttctgtgtgactgagctccctgaaggcaaggattatttttcaccaataccatgcatgtctagcagataacagtggtaaaaataataataatagcagtaacaattttataattacagaagtatataatgttgattttaataaatacctatacaaaataagtaacatattggatccttattgtgttctagccatttttctgattacattatattaattcaacctgtgttctagtatttttgttgaaatttatgtttgttgaactttgccatcctgtgaggttgtaacatctagggaatctttcattgtgtaggtgctatttgatcatgatctccgtctgaattctgcgaaatgtcttcacatacagcagagtcttagctggtaccagggagcattggaacttatatggtttggctgtgtccccacccaaatctcatcttgaattgtagctcccataattcccacatgttgtgagagggccccagtgggagataactgaatcatgggggcggtgtcctccctacttttctcatggtagtgaataagtctcatgagatctgatggttttataaggggaagcccctttcgcttggttctcatctctcttgcctgccgccatgtaagacgtcctttttttcttccttcgtcttcctccatgattgtaaggcctctccagccacgtggaactgtgagtccattaaacttctttcctttaaatattacccagtcttggatgtgtctttattagcagcacgagaacggactaatacaggaacctaggattcagcttcctgcagaagggaaatgacaacatggcccaaccaaacagctggcagtcaggacaggccaccagtcccatgaggaaactgaggtacaaagctggacacccaagagtaccaaggagtggatctcaaagcaaaacacacacacacacacacacacacacacacacacacacacacacacacacacagagctcttaattccaaaccaaaagaactgagcctgctgaatatctctttttccacttaaagcctaagaagtatctgagtccacaggtggggttactggtagccccagctataggttactgagtaggagaaacaaatcaggaattggcacagatacatactcacatgctataactaaagaatttcaaacttggaatcaatgtgcttttgcacattagcgtgacccccaaattttccaagcaccagctcagcctttccaaataaactgtctttggaataatgcaagtaaaataatatgggcagcctaataagcatttcaagaaggcaacaaatatttgtattttcttcatatgctactttcatagtttcaagagaaaagtgcttttaggaaaatgttcaggcttaggccaggcatggtgactaatgcttacaatcccagaaatttggaaggccaaggtgggaggatcccttgaggccaggagttcaagaccagcctcagcaacatagtgagagcttgcatttaaaaaaaaaaaaaaagaaagaaaagaaaagaaatgttccagcctaattgaaaaagtacatagcaatcaaattttattcccagctggcataaaactttctaactggtagccaaatttgggatgcctgaagacagacaagtgactaatgctagggctgtgtgtggccagtaccaaatgtattttatgaccacaagaccatgtctggattctcctttgtaattaccacacagcctactgtaattttcaagcttatatttacttcctgcctttgacatgtaattcagggtccaggactgcaccccgagcgagagtgaagtcctctctgtcatttggctaaaacctataaaatcatcattgtgtgaggatgtgtgtatgtgtttgtgttgccacgtctgctaaatatgttaagtgtaatcttgtgaaaaatatgcccactcctgccttgttggatgaggcactttgcttgtcagatgtttattgaacacctactaccctatgccagggactattttagactctgggaaacatccgtgagcaagagaatgaaggccgtgctttcctggaagagaacgagggagggggagtggagaagaaagacagacagaaaaatagcacttatggacatgtgctgtgtggagaacaagagtgatgtgatagagaaagtctgtgtggcttctttagcttgggacatcagagaaggccttgccaaggagatgacatttaaactgacattttaaaatgacaagaaggagtaggacaggcacagagcaggaggaagagcattccagacaggttagtgttaaggcccaaagacaggaggagcttggcatgttccagaaacagaaaaggccagtgtgccttgagcacagtgggagacaggacaactgagcagagaggttgcgtattaatccattttcatgctgttgataaagacatacctgagactggcaagaaaaagaggtttaatggacttaacgttccacatggctggggaggcctcacaatcatggcagaagacaaggaagagcaagtcacatcttacgtggatgctggcaggcaaagagagagagagcttgtgcagggaaactcccctttttaaaaccatcagatcttgtgagacttattgactatcacaagaacagcatgggaaagatctgcccccatgattcagttgcctctcattgggtccttcccacaatatgtgggaattcaagatgagatttgggtggggacacagccaaaccatattaggttgtcagggacagagtcacatggggctgtctaggccactgcaagaggcagacatgggaggttgtggcccttcgtgagggacactagttaggaagcaactgcagagggctgagcaggcggcagtagtggtttggaccaaggcatgaagtagagaatgagagaaggggctggatatggaatatggtgtagaaccagagtcagcagaacctactagtggattggatgtgaggaatgaagaaaagggaataaccaagaatgattccaaaggctttggctttgagcaactcggtggatggtgactgagaagaggagaaccaaaggcagagctgcttggctcttccctgagtcataactgacaagccacaaaaattgggaacttacatcttggggtccaatcaatgccctcatgacacctcccatccaattttacattgctggactgtatttgtagacctttggaaatactacttcaaacatatccagggtttctccttccttttggtgtacattttgtgacataaaaaaaaaaaaacatattcgagttacctaactctaccttgctccatccctcatgggtgcgctgtaaatgttagttcttgtgcaggcttcctgcttcagcacagttctggggcaccctgggcaggggcatctggaggtcaagtagaggtctgagatcagtccattggtcacaagttggacagccggcatatgcttctaacaacatcgtctatgtatatagaaaataatatgactagtttgcttgtttttctacttatagttaggaaaattttgtaacctctttactaaagattaaactgatttaatccaattgttgctttattataaagcaaatgtagatattttctacatttgccttaaaaatattgtggggttggccgggcatggtggctcacacctgtaatctcagcactttgggaggccaagacaggcagatcacttgaggtcaggagttcgataccagcctggccaacatggtgaaacccccatctctactaaaaatacacaaaattaaccaggcatgatggtgggtgcctgtaatcccagctacttgggagactgaggcacgagaatcatttgaacccaggaggcagaggttgcagtgagcagagattgtgctgctgcaactctagcctgggcaacagagcaagactccatttcaaaaatatatatacatagtggggcttaaattttcttgctacacaataggaataacaatatagttattcttcatgggtattttgttaggagtaaatgaaataatgtatatgacgtgcttagcactgtagctgctatataacattcagtaaatttgaggtattattatcaatgaaataacaatttggggctgggcgtggtggctcacgcctgtaatcccagcactttgggaggccgaggtgggcagatcacctgaggtcagttcgcgaccagcctgaccaacatggagaaaccccgtctctactaaaaatacaaaattagccgaggtggtggtgcatgcctgtaatcccagctactcgggaggctgaggcaggagaatcgcttgaacccgggaggcggaggttgcagtgagccgagatcacgccattgcactctagcctgggcgacaagagtgaaaatccatctcaaaaaaaaaaaaaaaaaatttgggagcagaggagctcccagaaccaacacacagattttaatattcaaatgaaccagtcagagaaaatagaacaacacattgatttattaaattcctgcatcactttggacaaaacctacactttctttgtatctcaattgtctcaggtaaatgtgagactcaggatagatagataacctcaactttaaaacttctgtgattctagtagatgatcaatattttctctcccatcttccttttaccagacttatcacaaagttttgtctttgggtcatctaaatcagtataagtgatatttattgccagatgtgaccttttgttagcacactggagaatcccaacgctaatgtcaatttctataaatatagattgagagtgaggaaatgttctgtctctagggaagtttagctattgagagtctttctctttttagactcttggtctgtggtctcttactcactcgtgacattcttccccagtctcacttttgttacctttttatttcgtgatcactgatgctggtagccacctacaattttgaagttccccactcagccttccctagtggtaggcattgcatttgagttgtgctttcttacttcctctaccttttgaaatttaaaaataggaaatagcaaacaaacccacagtctttcacatcagctgaactctgttattcatccagcagattttctggtgaattctctggcacaacgtatacagtcagaaaccagcatcagttcagaataaatggtgtacaaaattaagaaagagctacttttatttttactcttaaacacacgatcagaaatgggaggcagcagcataggaggaggctttgaaaagtaaatccaagggaaagacggctcctagccttctccttggcttttctccttacctgtccaactttcccgagccatgatgaagagtcagtggattgataaagggactctcttaggagtctaactcttgcactatgaataccaaagacaggccctgagaagcatgaaaacccatcatagccatgagcaatataatttccagagaccccaccccacagcaaacatactataatatggtacctgccctattaaatatcgttttaggacgggtgcagtggctcacgcctgtaatcccagcactttgggaggctgaggcaggcggatcacaaggtcaggagttcgagaccagcgtggccaacatggcgaaaccacgtctccactaaaaatacaaaaattagctgggcctggtggtggacgcctgtagtcccagctatttgggaggctgaggcaggagaattgcttgaacccgggaggcagaggttgcaatgagccaagatcgtgccattgcactccagcctgggcgacaagggcaagactcagcttcctgagtagctcaggttataggcgcccaccaccacgcccagctaatttttgtatttttagtagagaaggggtttcaccatgttggttaggctggtctcgaactcctgacctcaggtgatctgcccacctcagcctcccaaagtgctgggattacaggcgtgagccaccgcacccaaccttgctgtcaaaattttgaaaaaatatttgtataattttgctttggaaataggttggctaccagtaactgatttaatttgtaattgactattagtttcagcaattatcttaccatactgggaaatttttatgaagtttatgaagaaataaatccagccctacatattacttccaaattatgtattttcgattaccggatcaacaattaatgaagttaacttcacatttgcatagacctttaacatttagtaatttcagtactattgttattctgttttgaagccaaccaatggtttttaaggtctcagacgtttgtttagctctctgaaaagctggaagccccgaggcactgcaccttaatgcccagtggttaaaaatgctctgactggttattcccaagccctgagatcttcactgccttcttcaaagaataaaagctggtttaggggacagcaagctggcatacaaatataccagtctactccaagaaggtgactctctaagaaaaacaaagtaattggaggcagaatccctgtgttgcaattaattcaccaggttaccttgaacaagagctctgcagccctttccctgcccctcagtacagcttgagcatccctaatcccaaaatccaaaacccacaatgctccaaaatccaaaactttttgagcacctacatgacgccacaagcagaaaattccacatctggcctcatgcaacaagtacacatgagtgttaaaaatgctgcataaaattagcttcaggctatgtgtgtaagctttatatgaaacataaatgaaattcatgtttagacttgggtcccatcccccaagatatttcatcatgcttatgcaaatatttcaaagtccgaaatccgaaacacttctggtcccaagcatttcggataagggatactcaacctgtagtgcctttgcaaacaaacacctcatctggcctaggtgatggcccacagtcatcagttctatggaaccgaaaggtatgccacaccatctgaaccagaaacaagggcttcctctcacacattgaggaaagccatttttatgtctgtattattttgccaaaattaaagaaggaagggaagggagaaaagagtagagaagggaaagggaaaggagaaggaaggagaaaggactacaccatcaacatgtttagaaagctactgatcttttggctgggccccgtggctcatgcctgtaatcccagcactctgggaggccaaggcgggcagatcacctgaggtcaggagttcaagaccagcctggccaatatggtgaaaccccatctctactaaaaatacaaaaattagccaggcatggtgtcgtgcacctatactcccagctactcaggaggctgaggcaggagaatcacttgaacctgggaggcggaggttgcagtgagccaagatcgcgccattgcactccagcctgggtgacagagcgagactccatctcaaaaaaaaaaaaaaaaaaaaaaagctattgatctttaacttctgtgcaaaattacaagtatcttttcttcagagagaatggctttcatgtgagatactcccatcatcccattcaaatgttgtctatcatctgtttttggtttggtttggtttttcagttgggggccaatgggatgtaactcaaagaacatcagtttcagaagcagctcatgctctgttcaaagccagtcctgtcactatcactcagcagttctcaaagtgcaggccagggatctctagggtgctccaagggtctttcagagtgtccataaggtcaaaactgtctttataataatagtatgatctcatctgcctgtttcactctcattcttttcatgagtgaattttcccagagactacaggatatgtgatattgtgacagattgaatgcatacgcagatatccaaatccaactggctgctatgaagccagacattcaagatatttataaaaatggaaaacaatgccattcttctcattatgtatgtctgtgtgtatgggggggggtgttctggaaatataattttaacttttaaaatgtttatggtaacacgtagtgggattattactgttacttttaattttttggtttttttttttttttttttttgagacagagtctcgctctgtcaccagactggagtgaaatggcaggatcttggcccactgcaacctccaacttctgggttcaagcgattctcctgccctagcctcccaaatagctgggactacaggcacatgccaccatgcccagctaatttttgtagttttggtagagatggggtttcaccatgttggccaggatggtctcgatctcttgacctcgtgatccgcccacctcagcctcccaaagtgctgggattaaaggcgtgagccaccgcaaccggccttattgttattttttaatgaattttaaattccttaatcttaatgtctaatatgttaaatattgataaatataacccacatagaaaaagcttaaaagagttcatacctataactaaaaagtttgagaagccctgcactacctaattgtaatgactgtttattgattattgctttgtaccatgagctgtgcaaagcataccacattcttcatctcttttaatctttgccacaaggctgtaaagcagaggctttaaaaaagggcaccttgctagcccagcgtctcaccactggacaagaaagagatcaccaggtcggttctctgactctgaagccacacccttggtcactttctctataactttaaaaaagattttttttaactgctctgagcctcagtttccttatcaaaaatagtcagaatgaggtaccccgtagtgttctctgaaaagcagaagagtttctatgcatccagtccttacatgggggccaacagcaaatgctcccccagaaactcttcacctcccttccttccattccttccttttctttgacgttagaccagagaggcttatcaactctccattttcctctaggtggtcttcaagctgacagagaagctgacggaacagaaggagtggatgaagatataattgtgacccaaagtcagaccaacttcacctgccccattacaaaggtaccgcttcctcctacttcccctgaaagaaacacgattcacttcacagaggcagaaaggttcctgtttgctttctggtttgatttcacttagggagttaaggagggagtaaagaaaagtgctgggggttgaagagtatccacgggaggttcttgggctggagagagctgtcagtcaatcatgccctgaaggatccgggactaaagtcatggcctacaggccaagtgacagtactgccactggattccctgcatttccttatctaaagcctagtaattatgtaaagccatgagaatgggaagttaaacatagaaagctcaggactaggacgaaacacctactggaagttgatcattatcattcctgaaagcccaacatctccttgattacaggaggaaatgaagaagccagtgaaaaataaagtgtgtggccacacctatgaagaggacgccattgttcgcatgattgagtccaggcaaaagcggaagaaaaaggcctagtgagtggacgcagggaaggaagtggagccttccctagtggtagttactcagaggtggcgtgttcacgctagaggaagaggcacttcaatgtctcttctaaattccgttcacctcccgaatactgtaaacatggaagtgggctttctggaaaaacaatacatgagggaaaaattagtaatctgttcaggaagaagctgagggaacttcaaccacaccttcaaaacagaataaggccaggcagggtggctcatgcctgtaatcctagcactttgggaagccgaggtgggcagatcacctgaggtcaggagttcaagaccagcctggccaacatggtgaaaccccatctctactaaaaatacaaaaattagccaggcttggtggcaggtgcctgtaatcccagctactcgggaggctgaggcaggataatctcttgaacccaggaggcagaggttgcagtgagccgagattgtgccactgcattccaacctgggcaacagagctagactctgtctcaaaaaaaaaaaaaggtttaggtaaattcatggctaactcatgaatgataaattatttttttaattggaagttttgcagaatctttataaatagacataatatatattatatgttatatattgttttatatgtatatcatatattatttatctttaaatatatataatatacacacacacacatatatatatctcaccttccttccccttcttccatgaccacggaggaccatgctctgttcctgtaataacatagaatcctgagttagccagactgactggcattgacttcgtttggcatttcttgtgctcttatcatggatttgttgcaggaatggaattgcaggtgtgactagttctcaattgacttctgataacagtccctttgatgtgtggcttgcttctccattgcccagaaatttgctggtccagacctagaattggaattccccagcactcctcatctgggtgtggacttagagataatatattggagactaaagatatcttgatggtcattcaggcaaataacttatcctatgtattctagaagaatagtggctttgctgcctaatggttgcaaaatgtagacattcttagtacattttgatctgttttgagtttttgagttaacagttgaaatgtcagatttcggccaggcgcggtggctcacacctgtaattccagcactttgggaggccgaggcgggtggatcacgaggtcaggagatagagaccatcctggctaacacggtgaaaccccgactctactaaaaataaaaaaaaattagccgggcgtggtggcaggcgcctacagtcccagctactggggtggctgaggcaggagaatggcatgaacccgggaggcggagcttgcagtgagccgagatcatgccactgcacccagcctgggtcacagagtgatactctgtctccaaaaaaaaaaaaaaaagagggaggattctgggttgttaaatggcatgctttcttgctctttctcttttttttttttttttttttgagactgagtttccctctttttgcccaggctggagtgcaatggcgtgatctcagcttaccacaacctccgtctcccaggttcaagtgattctcctgcctcagcctcctgaatagctggtattacaggcatgcaccaccacgcccagctaattttgtatttttagtagagatggggtttctccatgttggccaggctggtctcaaactcccgagctcaggtgatctgcccgcttcggcctcccaaagtgttgggattacaggcatgagccatcgcgcccagccatggcatgctttcattagtttccttatccataaatgaatgacaatcgttgtaatcacctcattggcatatttgaaatttaaataagatacatgcaaagtacttaaagtagctggtacacagtagggctcagtaaaattatcccatcatcatcttcaaacttgagccactatcaacatcctcttcgtttttttccaccattgctctataggcatgggagacgaggacagttttaaaggagtaagatgagccaacctggagtttaggaagttactccaatagcaatgcagagatggattaaggaggcatgaggcaaaaaaaagtcagttaggatgcttttacagtggtttaagttatagaaaattagagtatagagatacaagagtgattgtggaggtacagttaacgacatttgacgactgactgaatgtaagagaaaggaagaagcagcgaggggtggctgacatttctcatctgggtgtctaatactgtcatttgctcattagcctccagagaaggcatgagagaggaacactcttattggaggattgtgatagactcagctcaggtcatcctaaatgcaaggtcccagcaatacagccccgtggaagtgtccaggaagtgcagcaagtgtgagttttgcagtcaggggaggactcagaactatcgatgtggattgggaggttatcagtatagacgagtcaacccgctcaactaccgtcacagatgcagctctggaacaaatgcattcaccagcagagagccagcaaggcaggacccgcacctcgcctgtgatctccacaaggccagagcccgacttcgttctgctcactgtgatgccttagcaccctggtgccaaccctcaaaaaacactttgttgaccaatgagaggatcaatcagcggaagaagacccctaaaaaagcagtctaaaatatagccaggagccaggaagagtgataaggagtggaggctcatgggaacttgtgggcggggtgggcagggttctgaaggccaggtgcatttgggcagcagtagattagaactcagggccttcttgaaaccaactccagaagtttctgatgaagcatgaagtcgtatcatttcccatgatgcacattagagtgatgagtatttctgggttcgctttgtttagaaatgtccatgacacattgtctcatttcttcctcctagattgttctagttatgtttgtttttttagactggagttccaggtccattgtgttctgggcactgcctgaattttactgtgcaagcttcaggccctgggaaggcctctctgcactggcttgagtcagaataatattgttgagactttagccccagccaagcacggtagttagaataatttcctaaaatatatctgttaacaataagcctatttattctcttaaaaataaagctgccttatgatttccttttttttttttcgtttcttttttcttttccttttttttttgagacagagtctcactctgtctcccaggctggagtacaacctctgcctcccaggttcaagcaattctcgtgcctcagcctcccaagtagctgtgattacaggcacatgccatcacacctggctaatttttgtatttttagtagagacagggtttcaccatgttgtccaggctggtctcgaactcctggcctcaagtgatctgcccaccttggcctcccaaccttatgattttcatatattaatatttctaacctgaccacagtcacttttttgcttttttgtttgagaacaggaaacatatttttaaaagtcatatttaagagcatgtagaataaaatgaaattgaatagaaatgggtcattcgacagcagaactccagctttgtgcttggaattcctgtttcaacacttaccaacaagccattcaacctttctgcctcagtttcctcatctgtaaagtggaaataacatcagcatctcacagcacttcaggggccaaagaaatggtagggaattccattctaggtctggaccagcacatttcttggcagaagagtagcaaaagcacttagttgaaagctcttttgggagcgaagagcgctaaacaaatagctgtagggttgttaagaccgaggctgatagagttgttatcactccccgtgctgcttagtgacacattatttgactcaggggttgtaagatagaattactgtctgtgttgaggtatgacaggaatccctcccactcagatttccagaggtctctatagaccttctgtctatagcttgtagactaaaccttggaattcttgggacccagatccaggaactcccagaatcatgtacttttgagcatttgcagaggccaaggttccccacagctctgtgggaccccaagacccggttccctttgctcagcagtcacctttgtgtttgccctgtgctgcagcgaaatgctctgcccgggtagtgcctggaggtggggacccagccgctcctgcgaggcctgaagggctgactcctgcacagcgatgatgcggcagctgaagatcgggtattgccacactgaactcgctcaccaagatgtcgtgggattaatgccgaatgcttacggagacagttgtttctccagaggaggcatgccttgattcagcactgtggcatgatggccttctcttatcctttctgctttaaaaacttgtgtttattggagacgaaggagaaacaaggtccttcccagttccagcatcaacctcgcctccaggaagtcttccctgagcccttattcatgctggacaaaatgtcgttagcaccccatgtcatgccaacattgtcagtgcagctggctcctctccacgagcttcttgagagcggaagctgtggactagggcagggactggtgcacggcaggacctgaagtgaactccccagtccttgacacacatcagcctgcttatttctcagccttattggacaggcttgtcctctgccttcatgttcttaaagggaaaaactgaggcacagagaatttagtcacttacccagagtgacacagccagggggtttaagcccaggtctttctcattcttgagcctgcaattctgtcagtaggccatccagctccccttgggagggctatttggttcatgcctctaccatcagagtctatctcctcagtgaactcagaccttgtttgacatggctcactctgggatccatcccactgaagtgaaggtgggcgcctgctctgcagctgagtgtgtggttaagtccatcagacattctcagcatgctctcatgcactgactaaaaccatgatgtcatcaggaagtcctccccacctcactctccacttccctctccactgcttattcactgtctggctatgaaagttaaggcctttgctgggtagaatggaagagaccaaggccaggcagtccaaagcagatattcagggttatgttttaagggagggtcatcccagcaacctacttggagttgcatttcaatgtcatggaagccaaagttatgatacttggcttttctagtcacaaaagtgtctgtatcctcttcatgatcttagctgctttttttcatacttacagacataattcaccaggcacggtggctcatgcctgtaatcccagcactttgggaggccaaggcaggtggatcacttgagctcaggagttcaggaccagcctgggaaacatggtgaaactctgtctctaccaaaaattttttaaaaattagccaggcgtgatattgtgcacctgtgggcccagctactcaggaggctgaggtgggaggattgcttgagcctcagaggcagaggtcacagtaagcagagatagtgccactccagtctgggtgacagaatgagaccctgtcaaaaaaagaaagaggaaagaggagagaaagaaagaaagaaagaaagagagagagagagagagagggagggagggggaggagggagggagggaaggaaggagaaaggaggagggggagggaaggaaagaaggaaggaagaagagaggaggaggaaggagaagagaggagggcggggagggagggaaggaaggaaggcaggaaggaaggaagaaaggaaggagaattcgctttgagacttcacagcgtagggggacaggctgggaaaaaaatacagatttttaaactagtgtaaaacatttctccagccttgccctaatgcaaagccaaatcatcaaaatgatgcatacctgggccaaatcaccctgatcctctttcatataattgcctttctgtaattatgatttaacacatcatgtacctgagtatgtagggcactttttttttgtttgttttgttttgttttgagacagagtcttgctctgttgcccaggctggagtgcaatggtgcaatcttggctcaccgcaacccccacctcctggattcaagtgattttcctgcctcagcctcacgagtagctgggattacaggcatgcgccaccacgcctggctaatttttgtatttttagtaaagatagggtttcgccatgttggccaggctggtctcaaactcctgacctcatgtgatccacctgcctcggcctcccaaagtgctgaaattacaggtgtgagccaccgcgcctggccatattttaatattttaaaaataaatactgttattaagcatattatatttcattgattaatacccctctaatgtaaaaactccttgatccacagatcagggccaagaaatactttctttcatgttggactgttgggcttcctaccactagacaaattggagctcccatgaccaactttctttccttctggtttgcatctttactgtggtttgcacatttgttgtttttggtcttaatatcctgtgctttatggagagctgtctcagatcactgggccagagctctgtgtgggcaggaaccatgtatttgtatttcacagttgcatgcttagaacctagcatagggctgatccctagaagagtcaattaatgcatgaatgggtgcatgcctgtgtgggatatatgcaagatagaaatagatccagaactttaaaacttcttggaagaatgatgatgagggaacacatgatagtcacaggggatctggaagggaattaacattattgagcacagaggatctgggagggaattaacagtattgactgtcaccttgggaaataagggttctctccccattttaactcagaggcaagggaggctcaagagggttattgtgaattgcctgtggtctcataactagcaagtaggtggtagagagaaaattcagacctaggttagcttgactccaaacattgggcctctaatctaccaaaatttggttcactttgagaaccagattctttgagaagaaataggtggtttcatccagcccactgccctcagagaagaccacatcgaagcagagccgtggcttgtttccacccctttgtgggtgactcactgatgtctttagctgcagcctttccaccgagtcccagtggcccactcagtctctcttctgggagggctactgggcatccattccagaggaaacagataccaaccaggactgtggttctgtgctgcagcctgttttgccccatcgtttcccactgtgatgaagggcactaccagtcactgatctacccagatgaagctcgcttcttccctttcgcttatgctccacagccactccatcggcaagtcctataggttctatggtcaagcatgtcctgaagctgatcgccataccaccctcagccgagctgccctcacctctctcctgcaccctgcaggatcccccatgctattttccctgcccttctcttacctccctgttttgtattctccataagcagccagagtaacattttccagatgtaaaccaaacacactcctcacccatctcaaaaccttccagtgttttgtcttcatatttaaaataaaatccaagtccaggcacggtggctcatgcctgtaatcccagcactttgggaggccgaggcaggtggatcacttgaggtcaggagttcgagaccagcctggccaacatggtgaaaccccatctctactaaaaatacacaaaattagccaggcatggtggcaggcgcctgtaatcccagctactcaggaggctgatgcaggagaattgcttgaacccaggaggcggaagttgcagtgagctgagatcacgccactgcaccccagcctgggtgaaagagtgagactccatctcaaaataaataaattaattaaattaaataaactccaaagccccattggcgcactgacctcacttccaactgctctccctcttgcctgggtcgctgcagccacatagagcttgctgtcactccagggcaccaagctggaacgtcctcagcactgcacttgctactgcctcagcccagaccacatgcagacttgttcccacgcttcattctgggtcctgccctagataagatgtgttcggtgaggcatgccctgagtccagccaatgaagctgtggccccagcactctctctccctgaccctgctttgttgccctcatagcccataaggtgacctgaacttgcagcaagcatttatttggttccctagtggttgcctgtcttcctcattagaaagatagctcataggctgggcgcggtggctcacgccggtaatcccagcactttgggaggccgaggcgggcggatcacgaggtcaggagatcgagaccatcctggctaacacggtgaaaccctgactctattaaaaataccaaaaattagccgggcgtggtggtgggtgcctgtagtcccagctactcgggaggctgaggcaggagaatggtgtgaacccgggaggcggagcttgcagtgagccaggatcgtgccactgcactccagactccgtctcagaaaaaaaaaagaaagttagctcatgataaggcaggcactactcacatatcgcttgtgtccccagcacccagacagggcctggctcaggtagggactcagtgaataaatgaatgagcacagcttggtcctgattttgacacttttcctttttcagtaaaatgccttacttaaacacttgagtataaaagaagtttctgcttaaggcagtaaaggggactgacttgatgttctttctttctcacagttgccctcaaattggctgtagccacacggatataagaaagtcagatcttatccaggatgaagcacttagaagggcaattgagaaccataacaagaaaagacatcgtcattccgagtaggaaaagccacctgcctgcagggacaccagcagcctacctcctaccccagctgtctgttgagagcagtgctgaccccagcagttagggactggctgcatagcatacttgttgggggtaaaacttgttgcttttatgtgtgcttgaaaacatttttcaaagttacacaacagaaatgcaatcatattgtttatttttaagtgttctataatgttaaataaaactttgatcatctgca

SEQ ID NO: 123 - DNA, 1352 bp, Homo sapiens
acccagtttccacccctccctcaaggcggcggtcctcttctatccgcagtcccggacctggagcgggtcagaccccgacttccgcccctgactccccaggcggtcacatgaccgaagcggctgggagcagggaggggcatcatgtgaccactcgccggcgacggctgatgacgcaagagcccgctctcacttttcagcggcaggcgaagggggctgaggaaaggaggcttttaagaactgtgctattgttgacttcttcacagaatcaagcactcttttggaagagggtaatctctctccaaaaactgaggacacttaccttccccatatattgagtccagctgtgtttggtggcccaggtactaatttcaagatgccaggacgttccagttcaaattcaggttcaactggtttcatctccttcagtggtgtagagtctgctctctcctccttgaaaaacttccaagcctgtatcaactctggtatggacacagcttctagtgttgctttggatcttgtggaaagtcagactgaagtgagtagtgaatatagtatggacaaggcaatggttgaatttgctacattggatcggcaactaaaccattatgtaaaggctgttcaatctacaataaatcatgtgaaagaagaacgtccagaaaaaataccagatttaaaattattggtagagaagaaatttttggctttacagagcaagaattctgatgcagactttcaaaataatgaaaaatttgtacagtttaaacaacagctgaaagaactaaagaagcaatgtggtcttcaagctgacagagaagctgacggaacagaaggagtggatgaagatataattgtgacccaaagtcagaccaacttcacctgccccattacaaaggaggaaatgaagaagccagtgaaaaataaagtgtgtggccacacctatgaagaggacgccattgttcgcatgattgagtccaggcaaaagcggaagaaaaaggcctattgccctcaaattggctgtagccacacggatataagaaagtcagatcttatccaggatgaagcacttagaagggcaattgagaaccataacaagaaaagacatcgtcattccgagtaggaaaagccacctgcctgcagggacaccagcagcctacctcctaccccagctgtctgttgagagcagtgctgaccccagcagttagggactggctgcatagcatacttgttgggggtaaaacttgttgcttttatgtgtgcttgaaaacatttttcaaagttacacaacagaaatgcaatcatattgtttatttttaagtgttctataatgttaaataaaactttgatcatctgca

SEQ ID NO: 124 - protein, 245 aa, Homo sapiens
MPGRSSSNSGSTGFISFSGVESALSSLKNFQACINSGMDTASSVDLVESQTEVSSEYSMDKAMVEFATLDRQLNHYVKAVQSTINHVKEERPEKIPDLKLLVEKKFLALQSKNSDADFQNNEKFVQFKQQLKELKKQCGLQADREADGTEGVDEDIIVTQSQTNFTCPITKEEMKKPVKNKVCGHTYEEDAIVRMIESRQKRKKKAYCPQIGCSHTDIRKSDLIQDEALRRAIENHNKKRHRHSE

SEQ ID NO: 125 - DNA, 34200 bp, Mus musculus
  misc_feature (1)...(34200): n = A,T,C or G
tttcaggggggctatgtctgtatctgcggcttctggaaggatggctctgactcagtctccgccttccttttgcccagcccccatctcaccatctctcttagtgtagactaagccagcctaaggttccctttaccacggaaacctcaggatctccccccccccttgcattcccgccagtgcaccttcttttcactctgtatccccccgaacttctgtcagggactctgtaaaacagggctacagagcttcctccaaggaaagaggtgaacttttgggactttggatttgatcaagtgcatggtccggcatctgcaagtgtctgaagcattggctggaaaccttcaggtttgtaccttctcctggcctctggctgccaggacctgggtgagatggaaattctaggcttccagagactgagtgaaaggcaaaccccctgttcccagcggaaacgctggaataaaactcccaaggctttaggtaaaagagaaaggaaaggttagagaaggaggagggtggggctgtccatgtgataggaagtcaaactgttttaaaaatcggcaactcaaagccgggcgtggtggcacacgcctttaatcccagaactcaggaggcagaggcaggcggatttctgagttcgaggccagcctggtctacaaagtgagttccaggacagccatggctatacaagagaaaccctgtctcgaaaaacaaaacaaaacccccaaaaatcggcaactcaaatgggcgtacagctctatgatgagatgggccattgttgctgaaacaggtattgaatttactggagctgggagcatggcctttctccggactgggatatcccccatttgtcttggcaactcacctattgggggaagagcttttagagagtgtgaggtgacagctaaggacccagtttggtggcctagggataaagtgggggtctctggccttcacccgctttatggggtatgggatactttgagaacgttacacagagagctttctggcgtctctcccaccacggaggaagagtggatgaatgaatgtctttggaagagggacctttggtttgctggattgatgctggctttggccccgggggggggggggcgggcacaggctgggtggttgtggcactttgtagagttcatcttgaaggttccagagggtgggcagagacagaggacaatcagcccaggagagctagtctctgagccggatctccgaggcgcccttctcccagaatccgcttagcacaaggggtctcaaaatcaaccataggtccccagacccagtgactattgcttgctggcccatgagccacccaacttttcttgaagcgagggacttttctttaggagacctatggagaagcagaggcctctaggagctccgatgagcctctggcctggggtgcctaggctatggggcacaagaaatcgaccacaagaaatcggtttctagtggatcctctgagaccacgcgcgcgcgtgcgacagcgtgcaccggtacactcccattgggtcgtgcccccacgtgacccggtgcgcgccccgagacggcgacgccgaggccgcgcccctgcgcgcgcacgtcctgactgttccgaggccgcgccctgtgcgcgcgcgtgccgagccctccgcgtcgtgccggcgccggcgcccggaccgccaggtcagtctccaccgcgccgctcgggcgggggcgcgcagggggccgtcggcgggggcgccgcctcggggacgcgcaggcggggacgcgcgccggtctgagtgtttgctcccggcgggggccgcgccccgcggcagcccctgtgtgaacccggccggtggttgccacgtgcagggccggagccgcagggaggccaggagtggggactcagccagctgttttttcggtgtggcgaccagacctgatgggtgaaaagggtgactctgctcccatttctaggggtgcggaagattccctcaacatctgcccggttttcatcttccctaagagatccctatctaggatttggttcgcctcaatttccttctctgcatagcttgggggcataggaccccatatcctttcttgcctcccgcatgaatgtcagtgggtcacctttgaaggctgggcattaagtcttgggtcccttagagacccgagtcctggcttaggcactctgggtcaggccagatgggacagcacctcactgtccatggggtcctgccgtagcctgtccacatgcagccggcttaagcaggcgactcctggtagggagctgcaggcatggctggactggatgccatgcttagcccccaaggcaggcagagtgaccatccctctgaccctatcagtgaggggcagagtggattccaggccggttgtcacagtgtgctgtgtccattgggtaagtggtgtacctctctacttggctgcatattttggaggaaactgcccagagtcttagtgttgagagcagtgtagtatggactcgttgggtggtgcctatggcctcaaatcctcccacaaggttattaaccccattctcagattatactggcactggagaagcggagtcaggtctagcccctaaggtctagccttgttctgcctgcagtgaggagagggaagacaacacatggagtctgtggcctgctctgagacaggctgtggggctcctacccttgcactcttactgtgagcctaaggatgggatgctgtgggaatgttcccaaacgtccccttgagaaggaactggctagccccagatatctgtctgctctcttctcttggcctggcctgggtacttgactcggaggtgttggtggtaggatcaggaccttagtggctgatggatagggcaagggtaagcagcctggacagatggtcattgaggatgttgaggtaggagcccaccaggaccccactgtctcctgccaccacagaacttggctgagggtggccagctcgtgtagttggtctggcagaaggggaactgaaggaaagctgcttcctcagtccggcaggcagctctgatggtggtggacagaaaatggcaggaggacctctggcgggggcagcgggggcaggggggggggagctggctctcactgactcggactcttggctagttcctgggggtgtgtaagggctgccaagttgcatgcctgacctcactgctgtagtgttgggatgcagggaacaaagctggccttaggaggtgtcacacgtctctgtatgaaatgagcccggagagatggctcagcagttaagagcaccgactcgctcttccaaaggttgcgagttcagatctcagccacaaatctctgatgcccagtggtgactgcgatgctccagagggtgaagtggtaccccgtgatatctctccaggcccagagccgggagctgttgggtctggagccgacagaacactgatcattttcctaagcctctgggcttgctttgctcccacagcaatgagcctgatagctctgatggcatggtgtgcaatggttctgacttatggtaggccatgtgcaactcctgtctgccctgtcctccctcaagaagcctcccagcccacccacttctatcctagctgccttgactatatatctgctccttctggcccatgtacattttctgcccacagtggcctcttcagcttctacacgtgtgcctgtgtgaggctgggttcagctcaccagagctggcctttcttttttgtctttgtttttctataagattcttttttctgtgtagtcctggctgtcctggaacttactctatagaccaggctggcttcaaacctagagatccaactgaccaggcatgcgccaccactgcctggcttggtttcctaatttctgattaatctagtcttgaagttttgtctcctgtaaaattgggggtgtggtatattttctgggaagatgggtattaaggatcaatccacaggggacatgcatggccttgttattcaggtgccacccagttggggctctgggatctagagagttacatttgggacagggctgtggtgtgctgtggactaggctggacttagcttggtattgtaaatgtaaagagcctgtcttgtatcctccaaatggacaggctgcagggtgtggagcacagaggggactgctgagggccctggggccaccagtagtgcacctctaagccatgttataatacagtgaataaggtaatgaagtatagttacgaggcccaagggagaggatggggctgtggggttctgaaggctccataggagttcacatggtggaggttgtgtgtttcctatcaagaggcacctcaggccagcactcctgaatctcactgtaatcatttggagctgggccaaagctgttgggtcagagacagttcagacaaaaagcaggctgctagcctagtgacgctggtggccctgaggggtctctgatgtcataataatgacataactatgactcaggagcttggctggccacctggtgtccatatagcatgtagctcagcctgggagcattaggacccaggtcttcttcttctagaacccttgaaagggacactagggtgacattgtgtacacagttgtcttccttggaacacccttctttccaccatttgcactgcgctcccttcccccatgcctacctgcttgtctcccacaagaggccccggtgcctcccagatgtctgtcccagatgtggagtctgcccgaagagtcagaatggtgctgtgtgttctttcctgcaggccacacaccctcctgcttggctgctacagatcctttctgtcctcctcagagtgagcagactacccgggtctatcctctgcatggccaggtgctagggatggggccaggaacggtgggggctctttagtagtgtctagtgacattagtggtgaccacaagggagggccgggttgtgaggctgtcttctggttctacagctgtgctggacctagaggtacaggaataggcacctagggcaccctgctggttggggatggctttggcctaggactagagcccaggcccaccattgtgggactatgctgctttcgtggggtaggttggtgggagggtatgggctcccattttttgagtgaggacctcaggagcaggcagctccaaggttcctgcagccgatctggttctccttgcctactgccctagctgagcatgggtgcccacagtgtgactgtccctgttgtgcttgtgtgcctgtgagaaggggaaaggtctagagtgtggttagcagggttgggccacaggtggtggggcaggtggccctagtttggctggaccagtttgggcatgaatgtcagtgtctcttcagttacatgtaaaagcaactgtgcagctgatgggttgagccatcatactgaaccaggggcctgacgcttgtctctagacgactgaggatccagtggacggaggcagccagggagtcaggtgtttactgggtgaagctgatgcccagcggtaggccgcctctgagctctacctttcccactccagtgagctcttgtgtacaggattgtccctgtcacttgccccagggacagcatgaatgttttgggccactgtccccctggggaggcaggcatgatagcctgttttaccaagaagttctgagattatgttagccagagtgtatggaatgtctacagggtgtctgtcgggttcttcttgacactgtcctgggtggtctctctcagaaggacccatcccctacagagcctgaggtgtggctcagcaccaaatggctcttggtagcaatggcttttggaacccatgacctggatctctggagggatagatagggcaggaggtgttggtgtatgtaggtgatgtgagactcagactcagggtaggtgtttagaaagggggatcctacctccagacccaagcatcacactgggggtgacctgtccagtctttctagactgccgtttacccttcaaaaggaagtgaccattttttcttctttttttgcttgcacagtggcagtatcatagccaacgaggtctatccaaggcgtgattattgctaattgaaaactgaaggcagtgacctttgggggttctagagctagatattgctgccctctgctactagggccagaaggagtctaggaaaggctattccagaaaccaacctggagttaggcacggcccctcctgttgccccctcctttgtcctgactctgctcggttcccacccctgtttcttggcagactgcgtagagagggaggaggcctgcctggacaggctgggctgcaggccctggacagggccaggttgagacacgggcagaggctgctgggttttggctgagtgggccagtgatcagtgatcagggtctggaaggtgcaggaagggcccaggtttcctagtaggtgaccttcaggtaaggatcagtgtaatggtggctgaagatccaaaccaaagctggcccagacccatggctgtgatcgggaagcatccctggttgatcctatggtttgagatgcatagccccaggagcctaacattctcctgtgggggggnnnnnnnnnnnnnnnnnnnnnnnnnnnnnnnnnnnnnnnnnnnnnnnnnnnnnnnnnnnnnnnnnnnnnnnnnnnnnnnnnnnnnnnnnnnnnnnnnnnnnnnnnnnnnnnnnnnnnnnnnnnnnncgccctagacctcagagtgctattttcttcttggaatcagcaagagttattgagtaccctagcagcgttgaggggctggaacccagtatatgggcagcagattatttaggtcattgggagccaggcatctggaggaaggttcaaatgagtaaaagactgataggctggcataggtctgctctaggaaatcagaataaagctactatgggtcttgctggccagcccgcctcagcctccatgccttcgggtctgagtggcatgagagatggccacttactagctagaacgctccttttaagcctcagtttcccctctgtagtgtcttatcttctgtatttctttccccctccttggatctgtggaatcctgtggaagcctgatcccaaggccatgggttcaccagacacacccaaagccggggctggcccagaaggaggaggtaggtcaactgtagcaagcaggcctggcttgtccccttcccttgggacctgggctcccattgcactcttgctcgaacctccctgtgactcaggattcccggaagcagttcagctgtgtttggaggatcccctatcccacccaggataatgccctcctgccccaaccatcatggcttctgcattggcccagtgtcacttgctgggtccctgctgtctgtgccccagagaggatgctgcttctttctggcagccctctctggcaatgcccactggccctgaaactctgccaaggcaagcagttccctctaatctcccagttaaggcagcaatgaggcccctcctccagggtcagctttcctctggctggttgcccagaggcccagcaaatgctgggaattgcgttgccgagcttagaggtgcccagaactcccagtggtccctccgtggtgatctccctgcctcttctcttcccttggccttagggaacatagccctggatataccatacaaagctggatggctgataagtacagcctggatggctgattcctggctatctgagctgagctgctgcacctgaactgggtgttagcgggcaccccccccccaccccccgaacgctgatttcactctcaggcctgtggcctgtgggggtgctgcctgctggtgccttgatttccctttccgtcagggctcttggggctggtgtggaccagtagtggcttcagagctcacaacagatgatcgcagcagttaaacactgttcacggctcagcttgtagatttggccacgtttgttgtaaatggcccagggaagagcttccttgtatgctggccttcccctttatgctcagcgctacaggaacaggatgccaacatcacacttggactttcccatggccttgactgtgggcctctggttcctgggtcttgaagggttgtttattgcctgcctccctacccccacttacaatggaagttctggacagctagggacgtgcgtttgggcattgtgtgaatctcttagtcccatctgctggccctgatcccacgttaccccattgccactgtcctggctgctgtatgggggatgaggacacaggctattggctttgttctgcctcccaggttccctggaagcagtcctggtctgtagtagcttcatgggagtagaaaagtggaaaaggcatggtcctatactggagaaactctctctctctctctctctctctctctctctctctctctctctcacacacacacatacacagcaggatgacagaggacagtaatcatcttcttggagcatgtagctctgcatcctagaggttgtgctgcaggaaggtgattttcttcttaccgggtagtcaggtgggcttctaggaggtggtggcaaatggtatggagagaggggctagtggggtgcagcccacgtcacctgggcagggctttgctgagccctttggggttggtggttaggcactggtccagggtacctctttaattctcaaggtaacctgggggtggctgctctttaaccccgccctccacccctcgccagttctcaggcaggaagctgctgtctggggctggcctcctgcaggtggaagtgtcaagtggaaggcaggctgatgttatgcctctgcagagtggcctgagccagctctcttggtccttttgtttgtggtgagccagagaaggcacccccaggtgtgtgtgggaggaacccagaacagctgtggcacccagttccctcagtgacagagaggcgatgattagctcataggactgcaccacgctgacggctgacatttgtctgctgccgtttgactgcgaggacctcagtttcctcccctgtcagaaggtgtgaagtctctgtttagggacttcgggagtcctcagctactgcgaggcaggccctcctgctcccccctacccctttgtctcctcctactagctgtagttcccacgactggccagtgcaggaagccatctggagggcttatttaccctcgcttagcctccctggcaggaagtcaccggaagggccgtccccaggggccccttcaggcctgtgaggacagccagcggcttgggggtctgtgctgtggagtcccccagtggagcaagggggcagggagctgggagaacagagccaggcagggctgggagccgggtgtgtggctggagtggggttgagacatttcatccaggagccatctgaccgtctgtccacccctcccccgcccagaggaggcccaatagcgctgatcacaggactcaggcaaagccacttggggctccacttgggtggtctgtgtgatgtgtgtgggatcctgggaacaggaggggacacacgttgcacggaccaccaggtggaggctgcatgggggaggagtgatctcagggcaggaagcggaagaggtgcaggaagcagatgtggccttgggaagggaggggcccctgggagtgggggcagaggagagagaagtagagagatcacagagcacaaatagtaccagtggtctgggcccttcggacccctctattccccttccacaggcctctggtccgtttgttcctcagaagtcctctcggacctccatatcagctcattagactggctgtttaggcctaggaacctgggcttctgccttacaggccaagcgtatccaactgccccaggcatttgtccattggctggtctaagtgtgattgacagggcctggggactgttcccacggacactgccagctgggcctgccctgccccaggagggacctcgaaccctgtgggacctgtggcctgggttcttggcagccttgtgtctgtcctggcttttcgtctgccttggggagttgggtgggccctgggggtcacacagccctgtctcagccagctatgggtaggtcaaggtatagcctcctcattctcagtgtctcccctcccccctgtttctggagacttccggtttctggagactgtagcttacgatacgaccctgagtgcaaacccctagatgtgctggggtttcccagacaagcatccttccaagcctctgtcctgtgctggaggaagtgaacatgagaacccagtctgggtcggaacagaggctgtcccttggcacagtggtggccattgattgtcccaggaggaccactggtaggtccagagcatttgctgtgtacaccgaggacatgccgtcctgcgatccagcttcacacagccctgggctgagactccccccacctcagaggctgtgccagggtcaggagatgattggctgtctctgtgaggccagaccttcagagtggggtcagccttggctcagcccaataatcttgccttcccacgagatactgagtgaatctgagatagtgcagaagtcccagtggaatgggctaaagtatttaaactacagccaaccccaagtgtagccaaggagcatcaagcacagtgggccaggtgtctaccttgtagctgagagtgcagagcccagggtaaggctgactgcaccgtgtcccggcctggctagggcagggacaccttagctgtgatgctgtcctaggcccagtacaccccgctgataccaggggatcttccctctgctcttcccttggcctgccaagacgagggcatttggatggacagagtcaggctaatttgggatcctaggcctgtgttcacagctgggaggcaacacccagagaatccacaggatacggcacataagcccgctgagcacgggagcagaaggatgggtcctggtcctcaaagattccagagatgatatagagaccatcaggccatgcaggctagggtgatctggagagtgtgtgcgtggtttctggccaacagctcagcaggtctgtgaccagagagtcccctagagagtccagagacatcattcaggaagtctttgccagggtgaggctacatccttaaggatcctggagggcctccagagggaggcagccaggataaacacgaacaagaagcccacctgccctttaccgtgtaggagcatgctgtgttcagaagtactggttagtgttcatcccccaccgacccccactgaccaccggctagactagagagtcaccgagcaatacgaggaaaaccaggaaccctcttctctaagctttaggagctagcaagagccataggctgccccagctggtgcataaagcccatgtggggaagaacaggtctacagcagttagggaaggttgagttgagtgcctgagagacctgtatggtctctgctgctgcccaagtctgggattgcaggcttgtgttggtaccctcggccccccagctgcatgcagaccctggatagctcgctcctggccactcggtttccttggtttatgttcccaaacagaagtaatcctggttctttcttggcatgtgctatcttccttgaggtgggctgcgggggtgggggggatcccctgagaaccttccttctcttgggggaggggcatcccaagtggtgacttttgatcatctctatctttggtccaggctctgaggttgggaggcttggtgggaagggacaagcctgccagctgtccttcatttcactggccacgtggtcctggccaggcctggtgtcctgggtatgtagtccccaccttggtcttatcccactgcacaccccctgtatttgcatacccattgaaatacctactgggtgcagtgttcagaatccatagacaagggcatcccctcagtgggaagaggacagattccaggtcagacagtgctgatggacagctgttagcccagaagtcactgacctgaggttcgagtgacgaggagacgtggggaggcagagacgtccattgagcagctaggccgtgcaaaggcctgggggcagcgctgcactgagctcagtggtttgcagacgcagctggggaggcaggtgcagaggaggcttagagaacagttactggttctggggcgatcctctgggtgcgagagcatctggaggaggccatggtctccctgaggtgtgatgggggaagatgaacgacctaggatacccagctggggctgttccaggaggcctggccctcaggcgagtggctcagcatctcactagacccccttccagagctgccctctgcctggggttgtagggactgtctgtgtcctctcttgtgttggactctgggacaggcctggatgaagaccagagatctgttggtgcccatggtgactctgatttctgagagctggcctagctggcttttattatagatgatgcccacttattccacagtggccctttgttgctgggccctcctgtggacacctatcctctactcttctattaacaatgacacgtccctcattgtcctgtgtatatgacagtcacacagtaagccagtcctggggatgtctaccccactacacagttgggtgaacttaaagaaggccaatgtaaatagacagtgactatcccatcctgtaggatggtgggaactggccaagtcttttttcttccccttctttcccagtgtttagggtccttcagagagagacactcagctgcccagatctcccaggagcctgctactggctctgtccaaataagctcagtaaacagccccagggtgctctctctagctcgcttgcgctctctctctctctctctctctctctctctctctctctctcccccctctctccctgtatccctctccccctccctccctcccttgtcagagtgtgttgcagcttttcaaatgcttagacaaacatttcctgtcctcaggggagtgatctgagctctcctgaggtcctgaccattgcccagtggcccatcaggtctgcccttctcccctcctctcccctttaccttgcacctcttcagtggccacacactgccaacattctgccaggtgccccaggtgtgggctggattctgttatcctgcccttgttgccatagcccacttccctgcctggtttaagctctaggcttcctggtccctctcggggtgccacagtgctcttggaccccggcatctcatagcatccgcctcccttattcctgcaatgatcaacactgtctccagctcgggctcacagtgatctaaatgtcccttagccgaggactagataaaacatggcatgttcctacagtggaatacgttttggctaataaaaggaagcgaagcactggcttgctacaagtgagatctttgaagacatgcatgtatgggaaaagacatcacaatggttccatgcgacatccttttaaaatcccagacagggaaccacagatgggggccagaggaagaggtgaatgcttgtggctgctctgtgtgctgacaggaggtccccagggcctcacacatgtttgcccagcactttgcccctgggctgcagctccaagacttccaagttttaaatctggagacagagtattgctgtatacccgagacaggccttagactgacaacagttcttttgtctcggctgcctgagtgttgggattaaaagaaaaattcccctgaaatctttagttaaatttatttattcaatcaccagttgattacttgattaattgatcgatcgattgattgattaattgattaaactcccaggagttggttttcttcctccaccatgtaggtcccagggattgaactcaggtcttcaggttgtgcagtaagcccctttacctgctaagccatcttgctgggcacttgagtgctggcattccaggggtgttccaccacacttggctgcagagtctctgtagttgtgaaggtattttggaactgggaagtagcaatgactacttagccctgagaatgaactgtcaaccacagcatctcatacttcctgtatggtgtacattgtaaggtattgtaattactgtaaggtgtgtatgcgtgtatgcgtgcatgcgtgcatttgtgtagaggccagggtcaactttgtgtgtatttagtctcccaggagccatccaccttattttcggaggctcagtctctcccaggcctggaacacgtcagttagactgggctgttaggctggtcagtggctctgggatctgcctgtctccatcttccaagtgctaaactcgtgctattacacttttaactggggctcagggattgaactcaggtctccatacttatgtggcaagcagtcttttggttgaaccgtcttcctggccaccaccaccaccaccaccagcagcagcagtatcttgtgctatggattttgttgacttgaaacttgccatgcagcccagatttgcctcatactcatgaaaatcttcctgccccagcttcccaacagctgagattatagcgcatcaccatgagtggcatattgaacctgcagggaggctatacgctttaaactggttgacatgaatcaggtctgatgcactcctggaatcccagaacttgtgagctggaggcaggaggaattcaaggccagcctcagctacatagggggttggaggccagcctaggctactagcaagacttgcctcaaaataaaaataataaaatatgatggtgaatttcacgttactagggtttattggagaggagacattgaaacagccttgcctaggggcttgctgaacatgtgttgccgggcttgtgaaaggacagcgatgcccttggctttgcctggtatgttaggactctgatcacagagggttggtgctagcaactcgggtgctgggcccaggctgctgcccttcttccacctgaggagctttcagtgaccacagtggggaacctggaaccatgaggggaacctgttctttgtcctcaccgccagtgcagcagatacttgcttctgtaagtctgccctgtgagcccccaaaacttagctatggcaagagcagctaaagctcttgttcctagctcctggtcctgcaggtgccaccaatgttgtctctacaaatccttgcttggctttgtcctggatctctgggagcctcggagtctggccgactcgtgaatgtcccagccaccgtggtgccaagtagagcaaaggtcccagcttaccccgagagccattctctggacactggatccctcccacactgtggccctctgcgtcctaagctgggaatccccttgtgcatggctttctatctgcctcaaacctggtgctgctgcctcctacccacccctgctgggacccatgggagacagggcagccccgagaatgtctggtgcatcctgaagtgcctgcaggtccctcccagcaaacccagcccgtacttggtgccagatgccgggagggatttcgctttaatcctgggagcagggcaggtgcttatgcaggccacgtggcctgtctgggcccagcatgcccagtgttcacacccacctcccaacgctttctgtgtgacccactcctgtgtggatgggaagtggaccctgctgtcttaggcagggtgatcaggcatttggatgggcagcagtgagccttggctggtgccttctggcagcgtgtcaaatctggggcatggagtgatctagtctgaggttgctgtggtgggcctctgtgtcattccaccgtacttaaaattggtgtcagatgcatctggaaggccgattggctgtctctcccttgtctctgtgtctagaatggggtctctggaaagtcttgtaggaaagaagttacttagactgttttccaaagaacccaggagtaccaacctgagtgagggtcctcaggggtcctagtggggacctggcccagagtcaatgttacagggacagtctgcagggctctgggaaagggacgtgtctcctagattctggacactgaggacagccccaccaaggccaggcttccagagtatccatctcactgatgagcagacagagcacagagcagtagcggatgccaccccatgtcatacagctcatacaagcgataggtagcagggaaccaggcagaggtccaagctggtaattctctgtgagggggtgggttctgcagccagaagtcaggggctgagcaagggtttgagccagccaccagagtaagtccccttgtctgccaccccagggagcttgctggcttttggcttgagctgaagctttaaggggtgggggagttgaagatgaggatcaagtctttctgagctgcctcagtttccctaaatgtcttatggtgtcacaggggctggccaggctgatgggagggaagtgatttggagataagtagggtcagtgtttttaggggctagcgctggctttgccagtgtgtgccttccaggagtgtggcttgtgtatgtggggtgatgcctgtgcctagtggcaccagtcacagtagctggggacagccagcagagcaccatggtgtggtcacttcnnnnnnnnnnnnnnnnnnnnnnnnnnnnnnnnnnnnnnnnnnnnnnnnnnnnnnnnnnnnnnnnnnnnnnnnnnnnnnnnnnnnnnnnnnnnnnnnnnnnnnnnnnnnnnnnnnnnnnnnnnnnnnnnnnnnnnnnnnnnnnnnnnnnnnnnnnnnnnnnnnnnnnnnnnnnnnnnnnnnnnnnnnnnnnnnnnnnnnnnnnnnnnnnnnnnnnnnnnnnnnnnnnnnnnnnnnnnnnnnnnnnnnnnnnnnnnnnnnnnnnnnnnnnnnnnnnnnnnnnnnnnnnnnnnnnnnnnnnnnnnnnnnnnnnnnnnnnnnnnnnnnnnnnnnnnnnnnnnnnnnnnnnnnnnnnnnnnnnnnnnnnnnnnnnnnnnnnnnnnnnnnnnnnnnnnnnnnnnnnnnnnnnnnnnnnnnnnnnnnnnnnnnnnnnnnnnnnnnnnnnnnnnnnnnnnnnnnnnnnnnnnnnnnnnnnnnnncccacccccaccccacccctgcccgtctggccccagagtcctgggctctgggtgagggatgaactgtctgagcctgccatgcattagtgggcttggcactaataaggacaaaacacacaggaagtaaatctctgggctggttctgtgggtgcctcagtttcctcatccagaaaatggggtgacgagtgcctcccagaactgtcctgagaattggtgtggtgtatatgaccaccacacagagaggctttggggttctctcatctcaaaggtatggatagcagacccagagaggagccggcatggagtggatgggtacagcctctactccggccactgggcaatcctactttcagctgtgaaccacttgagttgttgagcctgcttgagtttctgctgggccggtctcttcctctgtggggtgtggatgttcatgtttgttgcctgccagaggctgctgtggtgcttcctgtagaagtgaccacatagacccaggattccttgaggtcctgctatcctggaggaccacagcgtcctgggtatgccacccattggtcctcctctagaaggccaggctagcccagcttccaactcctcaggtgggggtgggggtggagactggctcctcacccaagagcagacctctccatcctgtccttgaggatgctgagtgggttagaagaggttttcagtgttggggttggggcacgagggaagggccacatggccagctggctgttggccgcatgctgatggtcctgggattttgacttctgcagaagggtcccaaaaggcagctgtagctggtccctcaagcagagggactgtggcctgtggcatggcaccttgcaggcaggtgcagaattgatgtaacttgtaccctacttgtatcatgtgccttttggccactgtgcacaccacagagtacaggtttgcatcttcacttggaagtgggcccaattccacgagtaccctggctgtgcaggcagcctcagcgcctggtgggcatcaggcagaggctgggttgagcatttctcagtgcgagtttccgtgtctccttgggacctctgacacctgtatagacttatctggtagctaacaagaggttagtcttaggcccagggaaccactcagctctctgaggtcccaacttgaagctcttgtcccctcctaggggctgtgcctgttaaaatccacaggacttgggctcaagagatgacccagtggttaaaagcactggctgctcttcccagttcaattcccagccaccgacatggcagctcacacctgcctataactccagttccaggggatctgacagcctcacccagacatatatgcaggcgaaaacattaatgcacatacaataaaaataaacattaattgaaaaaaaatccactggatggtaccttgtgtgacatggaggggcaggggtcaccgggtgaactgtgggccagacctcctttgggcctctgttcttggtgagagtgggggggggggtcttacctccctcaggggccgttagcaccaagtgagtccaagaaactccgtgccctctgggatgtcatcccactcattggccctcggctttgggggccttgcagcttggctggcactgtggcaggagttggcaccagcctagatgatgccaaggagggaaatgccaagtctgaggagtgagtcttttgctgggactgcagtgggctttccaaacctttctccttcaactgggatcctggtcttgcagaattcctgtcccagccatctggtgcggcagaatcataggcttacggtagccagtgccccattggcagaactcggggcttcccagacaggaccctagaactgggatgggttcccacctgcctacatggactgggactctatagacacgggtggcacagtggaaacctctgagtccagtattccatgcagaactgagctgggcctccccagggagggatgcagaccttcagcgggctctaccagtggacaggaactgcatcgagggtgacattacttctcggtgggaggttcctggccatgcaggggtgggcagagtggaagaggaactgtcggctgagggtaggaggacttggtaggctctgtacacacctagagactctgataggtccatccagctactgcaggatactgagttctctttcctggttgatcacttttttccctagaaattcatctctgtgtgtcccgtgtgtgcagatccttgagtgacatctgtgtggaggcacatgtgtacatgtggctgtgtgtccgtgttcatgtgtggagctgtgtgtacagcttttctttatattaccattgttggaacagcgtgctggttgaggagcgacaagggactggtcctgagtggcaggagcagcccctgccctgtttatggagtttcctgggggatgaatgggagtaggggtttgtgttgggcacgaaggggtgtggatgagcccctgggttgggccttggtgggccggcgggtctgttccactttaccctccttcttcctactagagcagcagttctcaacctgtgtgttgagactcccctttcggggtcaaagggccctttcacagggatcccctaagaccgtcagaaaacacagatatttatattatgataacagcaaaattacagttatgaactaataatgaaaataattttatggttgggatcaccacaacccgagggactgtattaaaggatcactacattaggaaggttgagacgaagtgtaccgccctagaggaagtgcgagccccagcaggcactgatgggacgtgggacccaaggtcaaacccagactgctgcctgctggggctgtctgggccgtgcttttaggtatggggctgtttacttggagggtggggtgaggtgagactcttatttctggtctgcattaggtaggttgtccacccccttggggctgtgatgacctgccacccaccctcccttgttcctgctgtcacaggtccctggaggactgcctgtcccctgtcccccgatcagcagggagaactgtatcaggtggtgtgaccctggaccctgtgtcgataccctgtttgggctacccctgagctcagtcctggggctgctatatcagggctcctgcctccacctctgacatagagggaagtgaataaaattagctgcaagggaagggtaagctcggaggccccaggaggtgaatgtcactagctctgaatgggagggtccttgtctggggacagcagataagaggagcttatcccagagagaagggtgtcatagcactttctaggggaagtggggaagggtgtcacccatgtggccagagtggcatctttttttccggcaagacccaagctctgcctttctctcagctctctgtccatcgtggggtgcctgaccctccctcctgtggtaccccagcttcagtgttggctgatccacgtgtccttgttacttccacaccagccatgccatcagaaagtgggccaggactacagtgggtggtgatgtggtggcagcacagctctggtgggcacagaaggaccagtgaggtccagagcctcccctatcacctcagccagccatatgctaacaccttcagcctaatggctcctatgaagtgcaggagagtcgcttctcatgctggtcatagctgtatacaaagtgacggtccccctgggctctgaggggtgtctggagaggctctggaggtgccacggttgatgggaatggagtgggcctcctgccatttcctttggttgcccattgggtgtaaaacttccgaggctgtgcaagtcacacaatagcagacaggaaggaggcctcggctagattgagtcaagcagaacgcaggcagccctctcctccttgtctatctggccacacgtaatacagggtttctcaatcttgggtctcagctggggtttgcttgcatatttggggaaagacatgggccggatcgtgagctgccagacaggtagacaccggtgctagttgctgatggagaatgcggttggttcctaccctgggaactgagtctgcttgaatgctgccgtcccagtttctcttttccatggtgacaatgtccagtccctgtttccctgtgctgtacctccctgcctaatatctcatgctctctgcaacctctatctctgtgatctctgggagtccattatggcatttgcttcctcaaccctaatcccgtgcaacaatgaggcatggagggagcctagacgtgctttgcaggtaaacatgtgaccgggagcttgggacacagtgtgatcagtggcttcctggagcacgaggttctggccttgggggtgtccgaggcttctgaggaagagagcagggttcctggaggtgtgaatcctgtaccctatcatttcttccactgaagggtgagtttggtaggctacaggagccatggaagatgtgtgagctgtggcaggtgggagacaccattcaatctgcagtttgagccaaaccttgaggccagtcctggtggcttgctgggtggcttgacagatggactggtgttcaatcctggtgctaatctgtgctggaatgtgagacgtaacgcgcccttccacacggacacacgtgtctgttacccacttaacactttcctgggtgtgaaggggtccctgatggagtgggatccctttatcagaagggtcagacatcgtggatgctgtcctttgaggcagccgggtctccagtcagagtcctacgtcttctgcaggtgtttggatgttgggtgagagaagccagacggcaagggtgagaaatcctgagacctgggcttgaacaaagggtgagtttgagagcgtatggccttgggggacatccagactccagtggtcctcttcttacaggattcaggagaggaggcagtactgtgctctgggcgtgagtgcagcttggagcgttcttgtttctggtgactgtaagggagttgaatttctgccttcatcctgatgtatggaggaaacccaggcacagagttcttgctcctctggaggagggctgtctctcatgacaggaacaggaagaaaaagatccaggagccatggctgtggtgtggtgtgggaggcattggtgggaagatgtgaagagaggaagataggatgagctggccagggtgcctcagccttgagcagacagcccagtgagagacagcattggcaaagcactgctcaactctgtatgcagtaacctgggaaacggaggtaccctgagtcaggagtgatgcctgcctacagcacagctgttctctcccatcttctcagtctccatcctgctcagccctgtgactggcaccaggaggtgctcagcatgcctgtctcactgagtgactgagtgagtgaatgaatgaatgaatgaacacttagattcccttccttttgggaaggaatcctaaggtcgaggttagtgtaggaggtcacaggctgtagaaggcaggagacatgtgagccaggactgagctcttgggaggtgaagtacagcataagaggaggaaaggggtatcctgtcagccatgactgaggcaactcgtggagacaggtctacccgatgccctttgaaagcatggagctggggctggagagatggctcaaggttaagagcactggttgctcttccagaggtcctgagttcgattcccagcaaccacgtggtggttcacaaccatctatagtgagaccaggtcccgttttctggtgtgcagacatacatgaagggagaatactgtatatatatataaatctcttaaaaaaccacacatgtagctcatggtggaccttcaggggtcagaggtcccaagtttagaaacctggtggacttcatgcacaattacttgggcccactctgtgcgccagtcggcagaagtgacagttacagcctttgatctgcagtggtgtaggctgatgccaggcgtgagggtgccctcagagagcgggagcctgggtcagcagatcaccactgtgctccacagggcactgtcaggctgagcctcggtagggacggcaggagcctgccttctggaaacccaggtctgtttccaggtcacagcccatagcatgcagggtgctggtaccaccttggaaggtggcttccctctctagcagtgtgtccttttatagaggtggccttaggctcatccctggctagcactgatcccaggtggcacagggcatcagagcagatggtcaatgcaggtaccaggagtatgtctgcctacctcctgggtcaccttctctgggaacccttccctgcccaccctgccacctggggctctcctgtggtccctatcctgtgcatagtttcagatggcccttgagggaccaagttggggaagtcccttaaagcaagaggcaaaggggcagctgacatagtggctccttcttggaaggcatggagctgctcttagggtggcctgggtgtcccctcctatgaagttctcccagacctcgagggctgaggtctcgtgataggttctggatggctccccaatctggacctctgcctagaacaccaggtcatttgttccttccataaacaagcgggagcttcttggtgccatgcctgggtgggaggtggggtatgggtggggcccagtgctaggttccccctccctttaaggatgccttccctgggctgggcacatagccaagggggttggggagagcctggggttaaggagcctgttttgtgaggggttgcacccttggaactgtgcgacacaggggtgtaagagctttggatgagttccgagggactggcgtgggtggagcctgctagggtctcccctcctggccccagagatgggttactctgggagggctccaagaaggctctggatgtgttatatatagacttctccgaaaggcttggggccctgccagctgtagcaggtgcccccaggattagctagaggccccagcatgctggtgtgtgtgtgtgtgtgtgtgtgtgtgtgtgtgtgtgtgtgtgtgtgtgtggtgtcacttggagccctggttgcagccctggctggtgcagcatctcagacgttgctgggcctgtcactaacaaacccttttctagacaactgatgggccaccagggatggtttgatgtgctttctcctacccacctgggattgggaccagtagggtctctgggggagggcaaatctccagtcatggtccagctacctggttgggtgacttggggcatctactcagtatctgttgtgttgctggaggctggtgccttgtggagggttcaggatctgcagtcaggatggaaactagtggaacagctgagaccatgggtctggtcagcaacaatgccgttaacctgctggatttataagggtggtatattctggggatcttaggtggctgcctagctttctgggggtgagccaggatggggctgcaatgggatgctccagcctggacgttatcagccctgcttacctgggccagggggagaatgggggatagtaggctctgctgtgcaaggttggctaatgagacttctctctgggagtattaggggcatgccctcccctggctcaggtccagcctttcagggatcattcctctccccagcaccaactactgattgcagggccaggcctctgtctgggagccgggcttgggccagggttcccagcaaggcaaggcctctggggattctgtgagctggaactcaagccctgcaccagaaggctcccagggcggtgcagccactggggcaggtgcggactgacatctgtctccattcttgggcgggagagcacagggttcctgcctgggatgccctaggacagaaccaggattccgtctggtcagtggagcccaggagacgatcctgctcaggggatgccctggaagacttcaggagagctgggtgggtgtcagttcccttggagatgagcctgtgtagagtcggctcccatctcttgtgtgactcgagtgtgcgtaggttcagtgcctcaggttcttcagctgtagtctgggagtggtggctcttaaggtgaagtgtgggctagtgcggctgagcacacagtagctgttcagtgtgcgcatatgaagctggagagctggaagggttcctcctggcttgtggcccctctgcagaaggagatctcctacccagcaggatgcacaggggatggcaggcgggtccgcggtggtcctctcccttcctccttcctccttcctcttcctctgctggccgcgcctttgtttgcgtgctatnnnnnnnnnnnnnnnnnnnncctttgtttgcgtgctatctttaagcagcatgtgcgggagccgctgtgagtcgggtcgcccgccggtcaccgcccccccacgtgacgccgggcgctataaatagctgggcggcgggcggcgggcatccgcccggagccggcgccgctgcggagggcgcgcacgggtcccggcccggccggccggcgcatggaggcggccgcacgcctgcgggcgcgggtgagccgggctgcgggcggcggggacccggcctcgaggacgctcccgaaccctaaccctactgggatgggccctgcacgggatggcggctccctggcgggctgggtgggaagtcccgctgaggtcggggagctgtgtgccctccccacgccccactacgggtccttggggtccccagcccatccacggagcagtcttgcctgtcttgacagcacagagtcctgaactgtgacccctgactcctaagtgtcacacagggtcccatttaggtcccttctgaagctagatgcactcccaccccaccacttgagggtgtggcttctgactacctctgtgtctttttttcccccctggggttcaagtgttcccgattactagactcgatgttgagaaaacctgggtgtctggacggccggagctggccagggtccagagaaggtccttccacgcccctctgtcccatgtcctcctctggcaaacagggacaaaaatgggtcttgaaaaacatgccggtctgggagcagctgagggcttaagatactgctagaggaggctgggcggggatagagaagggcccaggtcatagtagggtccttaagcaccaggggtggggagggtgtggtggcttgactgagtgcctgttgaggcaaggtgagctcagcttctgttcacacctagagctgctgggataggggtgtaggtagccggtgggcccacaagccttggctcaggcctgctagaatgcagtagaggtagacccccccaccccccaccttgttctctggtcttcttaaccccatagaagtgatgtgtccacctgggcatggtggcagatgccttaagtcctagcactcaggaggcccagccaggtggatctctgtgagtctgaggtcagcctggtctacaaagtgcggtccaggaggcaagacagggacagagaaacactgtctccaaagggggtgagcggagtgatgtgtcggcagaggggctcctttttgggagggcagccaccatgtggttgagcctgggtagactcaggcatgctgtgggcatgcccctttttgcccacacttaggggtgtggcccagactgcagtgaactgtgcatgtattataagatgcagttcagcctggtgtcacctatacatctggacccctggctccatcccctcaggcctggggggagcatgataggcggttcaggcttccttttctcagatgttgcttctgttgcccctggaatcttacaacccagccccaacccctgcaagtagccagtaggtgcagttagctctacaggagcctgccagtgttctctgactccctggggccttctcttcttttctcctgcacacacaagggcattgcagtgtgcacacatgggatgctcatctcagtaggcccgggtgtttgtgtcataacatgagagaaggctctccttgcttatagcgggctagtcgtggctccgcatgcacagggcgttgagaacctggcctgcccaagcaggcacaggactcctttctgccctcctccaaggggcccctctatcttagccctttcagaatggtggcagggactagctgtgagccatggcactgacttggagtggagtgctgagctgttctcaggtgtaggaggtagcgagggaggattctgcgctatctagtacagtcgagccttggacggtggggcctgtgcccgaagcttggggccagagaccagggtcttatgctggcctgaggctccaagggcctggtttgcttggtgggcagctggagaagggagagctggggacgagacagagaggtaagaggtacgggcagaactcttccagatgcgatccagaaggggccttccagaaagatgaatgctgggtgggggatgggctgagtccaggggctcaggctctactaactactggatcatagcccaagggactgtggtgccctctttttcaaccttcatcgtgtagatgggaaacgggtccagagaggccagtgacatgcccaaggtctcccaggccgtccagggggtggcagggtgttagctagctgttctttggggtccttgcagaggagaaggtggaggccgatgtcctccagtagtgcccttcccctgggtcctgtcaacggtgtgactcccttcctggccacctgtgctgtcacctccttggcatgagcctggcagctggccccttggcctgtggtctcttgcaaagcagaacgtcttgtttacctctagtgcctggcaagtccccgtaagttgtggctgtgggtagagatttcagaaagcctgaggggcagcaattgaggccactcagccccttgtccctctggcagtacccactgtccctgagacctgcccttgcagaacgatctgagcttaatattgtgctgtggctagcagtcccaagagagggaccactgcccttatgggctgtgagatgggggacctggcttctgctgctgtaggtgtactctgcttgtggggttcatatgctcctggggtgagccctgataccctcttcaccctatctcggtggctatgtatggctctcttgtcaccacaggggcctggggtagcccaggcaggagttgtctgtctgtttctgggtttcacgtggagaatctgaggacctcccatttctttctcccctcccatagattgtgccttctgaagaccagggtgggattgatggagaagccccaggagggcagctctgactactgccgttcccaacaccgtgggtgctgccgctgaggagacctgtacacctctggccctcaccattgtccttgcctcccaatggcctctgctgccaggccggaggccagcactgctgcctgagcccgctgcccctcttcaggacttgccgttccctgatggggtaacgtgacagaccggatcagaggctgcctgcccaccacggcccagggccgctagagtttggttgagttcaagttcattttccctttggtcctgacttctggggcccaactctgaccaaaggggacactcctccgtccacccatgcagagagggtgtctccagcgacggccccatagaggacactgctctgcggccggagtcaccaacccgaagttctctctgctcagttttttttggttgttgttatttttattttgactccttgtaacttctccactctgagggacaggactttggcgctgcccgtcttgctgcggggtggggggagaagtgtgcttgtttcttttcttttttagaattggtttttttggaattatccgccacgaggcagcttcctctccctctcccaggtatttgcacaatatttgtgcggggcgtaggggcgaggttttaagaagtcttttctttgtggacaagcacggggatctcactggacttggtgtggggggctggggcaccccccgtgcagcccttgctggctagtcccctctgggtccccggaggaggcatggcccgcatgaaccggcctgcgcctgtggaggtgagctaccggcacatgcgcttcctcatcacccacaaccccagcaatgccaccctcagcacgttcatcgaggtgagtgggccttcagggccgggtgggtgtcctgcacagctcagggtgcgatgggtgctcacgatccgatggctttcctggagggctgtcagcatccgtgcttcggggaatggacattgtctagtctgtggctgtccagaccctgggcgaccttagcctctgcagagacagagcaaataaagaggccgaggagggaggggctgacagggaaacggctcagagacaggcagattggaagaaggactgggagagctaccctgtggctaggccagcccacaagctcaggtgttaggaagccttagggaacagagagtgaccattgcagtctgtggaggtgacgtgtggagagtccacaagtgtctgtggtctgtggccaccctcacttcacccctagatgtgaccaggtattttttctgagcctgggtgggggaatatagctgggtggggtgggggagtgctgtcagcatggcctcactggggaccctgggcagggctccttactgcagatctggagctgcttgcagagtctgcatctggatgctgggccattggtggaatggacttttgtggctttatgttcttagtccttttctctgtggcacgagctaagccccatgggctcgtgggcatcaaaaagggacgaccgcatagaggaagacaatggacacccgaagactgccgactctcagttgagaagctttgtgacagtagaggctgatgaagggctaggaaaacaaaacaagacaaaaaccaaaacaaaccaaaacaaaccaccacgagtgaccaggacaggggctcgctcggtgtgtgaccagaatgagggtttcgcaaccatagtcaaggctcactgtatcaccagggtcagggaccacatggcaaacatgatctgatcagggttcagggtgtgagcagagttgggcctgaagcctgagctggctttctccttgatggactctgcagcaccccatggtctctgaggtggaccccctccctcgttttctgctttttgttttttcttgcactctcaaaatagttgggtcttggccttgctgtgtctgttgttcctatcacatggccagccagaccgtcatccctcaccactcccaaaatatccactgggggcaggtaggtgggggccggccctgcttgtggctgtgggtataaatactccacattggctgtgagctgagtgaacttttctctggaggaatggggcttcccccgtggtatttgagtggtgccacccagatggcgctggggttccaactcctggggtctacttgctggacactcgggaaggactctgtgggacccacccatgaagctcaggaaggggtctatctgaggcctaggccaccctgccggggacctagagctttatctggagaaccaggctttgcagtcaagaccctttgtcctaggtgctgcaagggtgagagggacaggaggggcttgaatcacagcagctgagctgtgtgtggcacaggtgggacagggacaagtgaccccgaagcatcaccaggctaccttgttagtcgctaagcatccaagcccccctgttgatttatgaaatctgcttgtctcaagggaagcagcttgaggggacactgctctgtttaggagttctagagggtaggcctgtggggactcagcatgggtagaggcctgggctggaggccgttctgggttctgaactgtccccccccccatctctctctttctgtcccaggacctgaagaagtacggggctaccactgtggtgcgcgtgtgtgaagtgacctatgacaagacccccctggagaaggacggcatcactgttgtggtgagggacatgtggttctgggccctgtggctgccctaagcaaggtctgggcagtagatttgggcctctcctgccacccgatacatcctgagctctctatctgtgcctgtgctggtgtgggggacagatgactgtgagaaagtcatcaaccctgtacccatcttccctgactagccctgaggtgaggtgacacacacttggtgctattggccattccaagcccttggcttatctgcgttgggccctgtgggtcctaccaggtgctccaagcctattggcagcctgtagccctgtaacttctgcgtagttcctttttggagcagttgaggcttggagtcagacattctcttagaccccagcaaagagacaggagagcttgcctggggagtgccattcccctaatggtgctgatttctctcacctgctgggtgtatttggcactgtgggttgaggcttgagccctgatagccctggagaccctgttgcacagatgaggttggggctcagcctgtgcctgcctggctcccctatggctcccagggggcctctcttgagcctctcatcgcctgccatgtgggagcctgtctcctggcagcattgcatccctagagaccctgtgcagaggtcgtgggtagggatcctagctgctgtttccctggcttccttaccctgggggctcggctaaggggaggaggagcaactttatggagctgggcctagtgcgtggagggccagaggagagacagccacaggggccacctctagcctggcctgttagtttcctggaacaaggcctctcttcccagtgcagaatctggataagccaggcttctcgctcagcagatcctgactgactgtgcagaggccctggtgcccagtcctcagcacagtagtgactctagtttactccactgtgaggacactgtgtcatatggggccctatatccactgcctggctatctcaggcctgggaggaatcctgctgaccccttcctgtgagatcctgtaggccattcggagcttcacgggcctcccataacgtggttgttcaggggaatgtgaacacgagatgaacgtatatcagcatctcttagtgccaggttgccccagcagacctccttcctctgtcacaagagggacttgggttagactcaggacagacacttaaattggtggtggcctcccggagctgtgctgtttggaggcagagacccagagagcttctctctatcatttagcacctgaagaccccatgttggttcacccattggtaccaataggttcaagatggattccttctccatcttccccacaccatttcccagcataccctgagctggagccttctccgtatgggctagcctccactacccacctggaactaagggacaggggaagggaagctaacatccctagggcaggtcctcaggcctcttcctctgcaggactggccctttgatgatggagcgccccctcctggcaaagtggtagaggactggctgagcctgctgaaggccaagttctacaatgacccgggaagctgcgtagctgtgcactgtgtggcgggcctgggaaggtgagtgacaggtggggctcgtgttgctgtcagaggctccacttgtgtccctgtggtctaactttatggctttgtgcatttggatgtgggccacatccgctctacctaagaccccggggtccccgggcaaggtctttctttcacagcctggcagggagggcttcctgctctgatccagtcactgcacctcatgcagaaaaagagctgccgcaaagacatcctggtcatccaggcttgacccttgcttgagtcacagctgctcacactagatggaagtgagccaggcaggagagcgcctgccgacacccctattgcaggaggcctggtgtgtgtgtgtgtgtggactcattcagtatgctcatagttctttttctaggtgcttaggcacagagaggttgtctgcatcccctctggttgaataggagggaccagactagagcagatagttgggctgtctggagtctgaaccctccaagggcagctgagggaagggggagggtcaatcatgccctccatgccctgtatctttatcaggtggtatgaggcagggggatgagaagtgtgcggggtctcaggtagcctcagctctgcttgttctcgcagggccccagtgctcgtggctctcgccctcatcgagagcgggatgaagtacgaggacgccatccagttcatccgacagtgagtagccagtgggtgggcgtggcacttagccaatctgtggcggttcttgacaacaactgggcgggtcttaggctgtccccacagcctttcctcgcccctcacttctcacttcggtagccattcctgcgaagaccccccccttctctctatccctccctggatgcccccaggccggtacctcctcgtggtatggtggccttcctggtagacccccatcttcctgatcttctgggcaaggacagttcagctgatgctgtacccattgcctgtggcatatgtgtgtgcatgcgggtgtgtgacatgttcatgtgtaggtacctctctgctgcctgaaataggcacagtcatctcttgtctccctggggcaggcccagtatggctgtagtagtatcacctactagcctgcaggtgtccataggggagcctggtatactacctgaagaacgacacaaagcacacactcacagttctcttgtgctggctagctagggtgagatgcacaccccagccttcatgaaatccaggcttccctgctttctcccagagtaccagcttagcctacctcctgtggactgtccactcaaggccacacagataagaccctcctagccctccagggtctggagctccccggggcaggcaaggtgtccaggccaggctttatgtccctctctctgtccttgtctgcaggaagcgccgtggggccatcaacagcaagcagctcacctacctggagaagtaccggcctaagcagagactgaggttcaaagacccacacacgcacaagaccagatgctgcgtcatgtagctcaggccctggccctgtacctcattacatctgtgtctaaggagtccaacggctatgtgcgtccctgctctgtccccatctgtacccacggctgtctttctgaagctgtccctggaccctctgccagtcctgtccaacccctgtccctcaccccccactgcccaggccttccccctggcctgtgtattgcaggtgggagtttttaaaccactgggcccaatgcctcagcggcgtggccctcaccctaacctttttccagcacctttgttaccaggtgctctggactctcaaggcaataaatcaggagctgtgg

SEQ ID NO: 126 - DNA, 2206 bp, Mus musculus
gacgcgcgccggtctgagtgtttgctcccggcgggggccgcgccccgcggcagcccctgtgtgaacccggccggtggttgccacgtgcagggccggagccgcagggaggccaggagtggggactcagccagctgttttttcggtgtggcgaccagacctgatgggtgaaaagggtgactctgctcccatttctaggggtgcggaagattccctcaacatctgcccggttttcatcttccctaagagatccctatctaggatttggttcgcctcaatttccttctctgcatagcttgggggcataggaccccatatcctttcttgcctcccgcatgaatgtcagtgggtcacctttgaaggctgggcattaagtcttgggtcccttagagacccgagtcctggcttaggcactctgggtcaggccagatgggacagcacctcactgtccatggggtcctgccgtagcctgtccacatgcagccggcttaagcaggcgactcctggtagggagctgcaggcatggctggactggatgccatgcttagcccccaaggcaggcagagtgaccatccctctgaccctatcagtgaggggcagagtggattccaggccggttgtcacagtgtgctgtgtccattggattgtgccttctgaagaccagggtgggattgatggagaagccccaggagggcagctctgactactgccgttcccaacaccgtgggtgctgccgctgaggagacctgtacacctctggccctcaccattgtccttgcctcccaatggcctctgctgccaggccggaggccagcactgctgcctgagcccgctgcccctcttcaggacttgccgttccctgatggggtaacgtgacagaccggatcagaggctgcctgcccaccacggcccagggccgctagagtttggttgagttcaagttcattttccctttggtcctgacttctggggcccaactctgaccaaaggggacactcctccgtccacccatgcagagagggtgtctccagcgacggccccatagaggacactgctctgcggccggagtcaccaacccgaagttctctctgctcagttttttttggttgttgttatttttattttgactccttgtaacttctccactctgagggacaggactttggcgctgcccgtcttgctgcggggtggggggagaagtgtgcttgtttcttttcttttttagaattggtttttttggaattatccgccacgaggcagcttcctctccctctcccaggtatttgcacaatatttgtgcggggcgtaggggcgaggttttaagaagtcttttctttgtggacaagcacggggatctcactggacttggtgtggggggctggggcaccccccgtgcagcccttgctggctagtcccctctgggtccccggaggaggcatggcccgcatgaaccggcctgcgcctgtggaggtgagctaccggcacatgcgcttcctcatcacccacaaccccagcaatgccaccctcagcacgttcatcgaggacctgaagaagtacggggctaccactgtggtgcgcgtgtgtgaagtgacctatgacaagacccccctggagaaggacggcatcactgttgtggactggccctttgatgatggagcgccccctcctggcaaagtggtagaggactggctgagcctgctgaaggccaagttctacaatgacccgggaagctgcgtagctgtgcactgtgtggcgggcctgggaagggccccagtgctcgtggctctcgccctcatcgagagcgggatgaagtacgaggacgccatccagttcatccgacagaagcgccgtggggccatcaacagcaagcagctcacctacctggagaagtaccggcctaagcagagactgaggttcaaagacccacacacgcacaagaccagatgctgcgtcatgtagctcaggccctggccctgtacctcattacatctgtgtctaaggagtccaacggctatgtgcgtccctgctctgtccccatctgtacccacggctgtctttctgaagctgtccctggaccctctgccagtcctgtccaacccctgtccctcaccccccactgcccaggccttccccctggcctgtgtattgcaggtgggagtttttaaaccactgggcccaatgcctcagcggcgtggccctcaccctaacc

SEQ ID NO: 127 - protein, 171 aa, Mus musculus
MARMNRPAPVEVSYRHMRFLITHNPSNATLSTFIEDLKKYGATTVVRVCEVTYDKTPLEKDGITVVDWPFDDGAPPPGKVVEDWLSLLKAKFYNDPGSCVAVHCVAGLGRAPVLVALIESGMKYEDAIQFIRQKRRGAINSKQLTYLEKYRPKQRLRFKDPHTHKTRCCVM

SEQ ID NO: 128 - DNA, 1965 bp, Mus musculus
tttcaggggggctatgtctgtatctgcggcttctggaaggatggctctgactcagtctccgccttccttttgcccagcccccatctcaccatctctcttagtgtagactaagccagcctaaggttccctttaccacggaaacctcaggatctccccccccccttgcattcccgccagtgcaccttcttttcactctgtatccccccgaacttctgtcagggactctgtaaaacagggctacagagcttcctccaaggaaagaggtgaacttttgggactttggatttgatcaagtgcatggtccggcatctgcaagtgtctgaagcattggctggaaaccttcagattgtgccttctgaagaccagggtgggattgatggagaagccccaggagggcagctctgactactgccgttcccaacaccgtgggtgctgccgctgaggagacctgtacacctctggccctcaccattgtccttgcctcccaatggcctctgctgccaggccggaggccagcactgctgcctgagcccgctgcccctcttcaggacttgccgttccctgatggggtaacgtgacagaccggatcagaggctgcctgcccaccacggcccagggccgctagagtttggttgagttcaagttcattttccctttggtcctgacttctggggcccaactctgaccaaaggggacactcctccgtccacccatgcagagagggtgtctccagcgacggccccatagaggacactgctctgcggccggagtcaccaacccgaagttctctctgctcagttttttttggttgttgttatttttattttgactccttgtaacttctccactctgagggacaggactttggcgctgcccgtcttgctgcggggtggggggagaagtgtgcttgtttcttttcttttttagaattggtttttttggaattatccgccacgaggcagcttcctctccctctcccaggtatttgcacaatatttgtgcggggcgtaggggcgaggttttaagaagtcttttctttgtggacaagcacggggatctcactggacttggtgtggggggctggggcaccccccgtgcagcccttgctggctagtcccctctgggtccccggaggaggcatggcccgcatgaaccggcctgcgcctgtggaggtgagctaccggcacatgcgcttcctcatcacccacaaccccagcaatgccaccctcagcacgttcatcgaggacctgaagaagtacggggctaccactgtggtgcgcgtgtgtgaagtgacctatgacaagacccccctggagaaggacggcatcactgttgtggactggccctttgatgatggagcgccccctcctggcaaagtggtagaggactggctgagcctgctgaaggccaagttctacaatgacccgggaagctgcgtagctgtgcactgtgtggcgggcctgggaagggccccagtgctcgtggctctcgccctcatcgagagcgggatgaagtacgaggacgccatccagttcatccgacagaagcgccgtggggccatcaacagcaagcagctcacctacctggagaagtaccggcctaagcagagactgaggttcaaagacccacacacgcacaagaccagatgctgcgtcatgtagctcaggccctggccctgtacctcattacatctgtgtctaaggagtccaacggctatgtgcgtccctgctctgtccccatctgtacccacggctgtctttctgaagctgtccctggaccctctgccagtcctgtccaacccctgtccctcaccccccactgcccaggccttccccctggcctgtgtattgcaggtgggagtttttaaaccactgggcccaatgcctcagcggcgtggccctcaccctaacctttttccagcacctttgttaccaggtgctctggactctcaaggcaataaatcag

SEQ ID NO: 129 - protein, 171 aa, Mus musculus; identical to SEQ ID NO: 127

SEQ ID NO: 130 - DNA, 1682 bp, Mus musculus
gcgcgcgtgccgagccctccgcgtcgtgccggcgccggcgcccggaccgccagattgtgccttctgaagaccagggtgggattgatggagaagccccaggagggcagctctgactactgccgttcccaacaccgtgggtgctgccgctgaggagacctgtacacctctggccctcaccattgtccttgcctcccaatggcctctgctgccaggccggaggccagcactgctgcctgagcccgctgcccctcttcaggacttgccgttccctgatggggtaacgtgacagaccggatcagaggctgcctgcccaccacggcccagggccgctagagtttggttgagttcaagttcattttccctttggtcctgacttctggggcccaactctgaccaaaggggacactcctccgtccacccatgcagagagggtgtctccagcgacggccccatagaggacactgctctgcggccggagtcaccaacccgaagttctctctgctcagttttttttggttgttgttatttttattttgactccttgtaacttctccactctgagggacaggactttggcgctgcccgtcttgctgcggggtggggggagaagtgtgcttgtttcttttcttttttagaattggtttttttggaattatccgccacgaggcagcttcctctccctctcccaggtatttgcacaatatttgtgcggggcgtaggggcgaggttttaagaagtcttttctttgtggacaagcacggggatctcactggacttggtgtggggggctggggcaccccccgtgcagcccttgctggctagtcccctctgggtccccggaggaggcatggcccgcatgaaccggcctgcgcctgtggaggtgagctaccggcacatgcgcttcctcatcacccacaaccccagcaatgccaccctcagcacgttcatcgaggacctgaagaagtacggggctaccactgtggtgcgcgtgtgtgaagtgacctatgacaagacccccctggagaaggacggcatcactgttgtggactggccctttgatgatggagcgccccctcctggcaaagtggtagaggactggctgagcctgctgaaggccaagttctacaatgacccgggaagctgcgtagctgtgcactgtgtggcgggcctgggaagggccccagtgctcgtggctctcgccctcatcgagagcgggatgaagtacgaggacgccatccagttcatccgacagaagcgccgtggggccatcaacagcaagcagctcacctacctggagaagtaccggcctaagcagagactgaggttcaaagacccacacacgcacaagaccagatgctgcgtcatgtagctcaggccctggccctgtacctcattacatctgtgtctaaggagtccaacggctatgtgcgtccctgctctgtccccatctgtacccacggctgtctttctgaagctgtccctggaccctctgccagtcctgtccaacccctgtccctcaccccccactgcccaggccttccccctggcctgtgtattgcaggtgggagtttttaaaccactgggcccaatgcctcagcggcgtggccctcaccctaacctttttccagcacctttgttaccaggtgctctggactctcaaggcaataaatcaggagctgtgg

SEQ ID NO: 131 - protein, 171 aa, Mus musculus; identical to SEQ ID NO: 127

SEQ ID NO: 132 - DNA, 1664 bp, Mus musculus
cggcgcatggaggcggccgcacgcctgcgggcgcggattgtgccttctgaagaccagggtgggattgatggagaagccccaggagggcagctctgactactgccgttcccaacaccgtgggtgctgccgctgaggagacctgtacacctctggccctcaccattgtccttgcctcccaatggcctctgctgccaggccggaggccagcactgctgcctgagcccgctgcccctcttcaggacttgccgttccctgatggggtaacgtgacagaccggatcagaggctgcctgcccaccacggcccagggccgctagagtttggttgagttcaagttcattttccctttggtcctgacttctggggcccaactctgaccaaaggggacactcctccgtccacccatgcagagagggtgtctccagcgacggccccatagaggacactgctctgcggccggagtcaccaacccgaagttctctctgctcagttttttttggttgttgttatttttattttgactccttgtaacttctccactctgagggacaggactttggcgctgcccgtcttgctgcggggtggggggagaagtgtgcttgtttcttttcttttttagaattggtttttttggaattatccgccacgaggcagcttcctctccctctcccaggtatttgcacaatatttgtgcggggcgtaggggcgaggttttaagaagtcttttctttgtggacaagcacggggatctcactggacttggtgtggggggctggggcaccccccgtgcagcccttgctggctagtcccctctgggtccccggaggaggcatggcccgcatgaaccggcctgcgcctgtggaggtgagctaccggcacatgcgcttcctcatcacccacaaccccagcaatgccaccctcagcacgttcatcgaggacctgaagaagtacggggctaccactgtggtgcgcgtgtgtgaagtgacctatgacaagacccccctggagaaggacggcatcactgttgtggactggccctttgatgatggagcgccccctcctggcaaagtggtagaggactggctgagcctgctgaaggccaagttctacaatgacccgggaagctgcgtagctgtgcactgtgtggcgggcctgggaagggccccagtgctcgtggctctcgccctcatcgagagcgggatgaagtacgaggacgccatccagttcatccgacagaagcgccgtggggccatcaacagcaagcagctcacctacctggagaagtaccggcctaagcagagactgaggttcaaagacccacacacgcacaagaccagatgctgcgtcatgtagctcaggccctggccctgtacctcattacatctgtgtctaaggagtccaacggctatgtgcgtccctgctctgtccccatctgtacccacggctgtctttctgaagctgtccctggaccctctgccagtcctgtccaacccctgtccctcaccccccactgcccaggccttccccctggcctgtgtattgcaggtgggagtttttaaaccactgggcccaatgcctcagcggcgtggccctcaccctaacctttttccagcacctttgttaccaggtgctctggactctcaaggcaataaatcaggagctgtg

SEQ ID NO: 133 - protein, 171 aa, Mus musculus; identical to SEQ ID NO: 127

SEQ ID NO: 134 - DNA, 1684 bp, Mus musculus
gtgcgcgcgcgtgccgagccctccgcgtcgtgccggcgccggcgcccggaccgccaattgtgccttctgaagaccagggtgggattgatggagaagccccaggagggcagctctgactactgccgttcccaacaccgtgggtgctgccgctgaggagacctgtacacctctggccctcaccattgtccttgcctcccaatggcctctgctgccaggccggaggccagcactgctgcctgagcccgctgcccctcttcaggacttgccgttccctgatggggtaacgtgacagaccggatcagaggctgcctgcccaccacggcccagggccgctagagtttggttgagttcaagttcattttccctttggtcctgacttctggggcccaactctgaccaaaggggacactcctccgtccacccatgcagagagggtgtctccagcgacggccccatagaggacactgctctgcggccggagtcaccaacccgaagttctctctgctcagttttttttggttgttgttatttttattttgactccttgtaacttctccactctgagggacaggactttggcgctgcccgtcttgctgcggggtggggggagaagtgtgcttgtttcttttcttttttagaattggtttttttggaattatccgccacgaggcagcttcctctccctctcccaggtatttgcacaatatttgtgcggggcgtaggggcgaggttttaagaagtcttttctttgtggacaagcacggggatctcactggacttggtgtggggggctggggcaccccccgtgcagcccttgctggctagtcccctctgggtccccggaggaggcatggcccgcatgaaccggcctgcgcctgtggaggtgagctaccggcacatgcgcttcctcatcacccacaaccccagcaatgccaccctcagcacgttcatcgaggacctgaagaagtacggggctaccactgtggtgcgcgtgtgtgaagtgacctatgacaagacccccctggagaaggacggcatcactgttgtggactggccctttgatgatggagcgccccctcctggcaaagtggtagaggactggctgagcctgctgaaggccaagttctacaatgacccgggaagctgcgtagctgtgcactgtgtggcgggcctgggaagggccccagtgctcgtggctctcgccctcatcgagagcgggatgaagtacgaggacgccatccagttcatccgacagaagcgccgtggggccatcaacagcaagcagctcacctacctggagaagtaccggcctaagcagagactgaggttcaaagacccacacacgcacaagaccagatgctgcgtcatgtagctcaggccctggccctgtacctcattacatctgtgtctaaggagtccaacggctatgtgcgtccctgctctgtccccatctgtacccacggctgtctttctgaagctgtccctggaccctctgccagtcctgtccaacccctgtccctcaccccccactgcccaggccttccccctggcctgtgtattgcaggtgggagtttttaaaccactgggcccaatgcctcagcggcgtggccctcaccctaacctttttccagcacctttgttaccaggtgctctggactctcaaggcaataaatcaggagctgtg

SEQ ID NO: 135 - protein, 171 aa, Mus musculus; identical to SEQ ID NO: 127

SEQ ID NO: 136 - DNA, 1760 bp, Mus musculus
tggtcttcttaaccccatagaagtgatgtgtccacctgggcatggtggcagatgccttaagtcctagcactcaggaggcccagccaggtggatctctgtgagtctgaggtcagcctggtctacaaagtgcggtccaggagattgtgccttctgaagaccagggtgggattgatggagaagccccaggagggcagctctgactactgccgttcccaacaccgtgggtgctgccgctgaggagacctgtacacctctggccctcaccattgtccttgcctcccaatggcctctgctgccaggccggaggccagcactgctgcctgagcccgctgcccctcttcaggacttgccgttccctgatggggtaacgtgacagaccggatcagaggctgcctgcccaccacggcccagggccgctagagtttggttgagttcaagttcattttccctttggtcctgacttctggggcccaactctgaccaaaggggacactcctccgtccacccatgcagagagggtgtctccagcgacggccccatagaggacactgctctgcggccggagtcaccaacccgaagttctctctgctcagttttttttggttgttgttatttttattttgactccttgtaacttctccactctgagggacaggactttggcgctgcccgtcttgctgcggggtggggggagaagtgtgcttgtttcttttcttttttagaattggtttttttggaattatccgccacgaggcagcttcctctccctctcccaggtatttgcacaatatttgtgcggggcgtaggggcgaggttttaagaagtcttttctttgtggacaagcacggggatctcactggacttggtgtggggggctggggcaccccccgtgcagcccttgctggctagtcccctctgggtccccggaggaggcatggcccgcatgaaccggcctgcgcctgtggaggtgagctaccggcacatgcgcttcctcatcacccacaaccccagcaatgccaccctcagcacgttcatcgaggacctgaagaagtacggggctaccactgtggtgcgcgtgtgtgaagtgacctatgacaagacccccctggagaaggacggcatcactgttgtggactggccctttgatgatggagcgccccctcctggcaaagtggtagaggactggctgagcctgctgaaggccaagttctacaatgacccgggaagctgcgtagctgtgcactgtgtggcgggcctgggaagggccccagtgctcgtggctctcgccctcatcgagagcgggatgaagtacgaggacgccatccagttcatccgacagaagcgccgtggggccatcaacagcaagcagctcacctacctggagaagtaccggcctaagcagagactgaggttcaaagacccacacacgcacaagaccagatgctgcgtcatgtagctcaggccctggccctgtacctcattacatctgtgtctaaggagtccaacggctatgtgcgtccctgctctgtccccatctgtacccacggctgtctttctgaagctgtccctggaccctctgccagtcctgtccaacccctgtccctcaccccccactgcccaggccttccccctggcctgtgtattgcaggtgggagtttttaaaccactgggcccaatgcctcagcggcgtggccctcaccctaacctttttccagcacctttgttaccaggtgctctggactctcaaggcaataaatcag

SEQ ID NO: 137 - protein, 171 aa, Mus musculus; identical to SEQ ID NO: 127

SEQ ID NO: 138 - DNA, 13939 bp, Mus musculus
ccctgaggaagtgacaacaggagtgcccttgacgggcaggccggctgggctctgcatccctctgctcgcactgccgggaggtaggagcccttgcggggtgggctgagccgggctggcggcgcgcttctctgcaggaaggcgatcggcagggggatgcccctagagggaggaggtggccttggcagctgcacgtcctgtgctcccagtctccctgtcccccaccctccccaacacgtgtccattctttgggcttccctccgtacacatgccacccgcttcactttggtaccccatggccggttcctacgcctctcagttcctccttccgtagttgggagtcttcttcgctcattcttcgacagcttccctttccttaatttcccataaaaacacttttttaaaagaatgactgataaaaattttacagacggccttgggttccaattagctgtactttaaaaactggcctacgttgggcatggcacttaacctacctgttgccctgagtatggacggtattataaggtttcttcagagttgatcagagagagccagtgatgtgtgtgtgtgtgtgggggggggggcattgggctatacacagtgatgtaaggcacttgagccttgtccctccctccattgaccttttataattccacctcagccttgatttctttttggctgtcaacccagtttttctgcccttctaacttaacgtctattcagtgatgctgactccttactcacctctagatattttttttttgttgtcgtggggaggttttagagaccaggttttattgtctagcccaaactgaccttgccttatatcacctgcctcgcctcccaggaggaggattgacaggtgggccccaccacacctggcctttgaaaatcatatattacagtatttccatgcatcttgcttccaattctgtatgttcccaacacctcattattccagaattctttgttttcctagtgtgttgacttcctattgcatggccccagctcttcctgcctcttgctcccacagatggctcagcggctcctcctggggaggttcctgacctcagtcatctccaggaagcctcctcagggtgtgtgggcttccctcacctctaagaccctgcagacccctcagtacaatgctggtggtctaacagtaatgcccagcccagcccggacagtacacaccaccagagtctgtttgacgacctttaacgtccaggatggacctgactttcaagacagagttgtcaacagtgagacaccagttgttgtggactttcatgcacagtgagtactggggacagtaagagatggagggtcttacttaagtatttattgagggctcactatggctctctaccatgtgtaatgcttatctacatacactcattatgaagacttttgagaccctgtgcctgtccttaagtatgcagtatggtaggagacagattgatggtcttcctagcacactaggagacatgctgcctcatgcctacgtcctgtatctcagtgcccgaaaagctcagagtctgctccagtgtggaacaacatcgtattttaacatcgaaacccactaaaactgtgggaaggactgggcaaaacattatcagtgccaccatagccgtccccaagtacggatggggtgggcaggaggtgtatcttctcagtaccgcaggggtgtgttttagagatatataaatgcctgccttgtggcctggtcttcatttccagacctttacaccagattcaaccaaaaagccaagaacccgattgccatcaggttttctggacaagtctcaccgattcttttgttttcttcctggtcctttctctgactcacctcgttgccttgaccaggccagtgcgtgtccttgtcatctgagataaggccttgcaggctggctttttaggtatagatttattaattgattgacatttctgaatgggagttttggggtaggggataggggttgagatagagtcttgccatttagcctaggtcagacttgaacttatctcctcctgcctccacctcctatatatgagattactggtatgtgccagctcagaaaaggagttaatggccagggacctctgccttcctgtgatggtgggggggcttcgaagggaatagtcagtgggctaatccttcttttgtcctatacaaggtagttaattgcatggttcagctttgtttgtttagtgccaggcacacgtccggtaccacatacagagatgatagcacactgtctgccctaggagagttcctgctccccagccaaggagggatcgctcccgtacattgcagtgtgatcctcggccgctgacacaaaatcagaagaaagttctggagtgaaagggtcacccagagacactttgtctacaaaaaaaatcccaggggctggagagatggctcagtggttaagagcactgactgctcttccagaggtcctgagttcaattcccagcaaccacatggtggtgagccaccatctgtaacggggtctgatgccctcttctggtgtggctgaagacagatacagtgtactcatatacataaataaataaatcattaaaaaacaaaaacgggctcacaaccatccgtaacaaaaatctgatgccctcttctggagtatctgaagacagctacagtgtacacacatataataaataaataaatctttaaaaacaaaccaaaaaaaaacaaaaacaaaaaaacaattttagtggctggagagatggctccgcggttgagagcattggctgcttttccagaggacctgggttcagttcccataacccatacggtagctcacaaactgtctatatctccagttctaggggagctgacaccctcacaccagtgcacataaattcaatttataagtaaataaaaaaaaaagggttaacctttgtttagctgggcagtggtggtacatacctttaatcccagcattcgggaggtaaggacaggtggatttctgagtttgaggccagcctggtctacagagagttccaggacagccagggctacacagagaaaccctgccttggtctggtgagatggctcagtggttaagagcactgacttccgaaggtccagagttcaaatcccagcaaccacatggtggctcacaaccatccttaacaagatctgactccctcttctggagtgtctgaagacagctacagtgtacttacaataaataaataaatctttaaaaaaaaacaaaacaaaacaatgaatttattaaaaaaaaaaaaaaaaagaaaccctgccttgaagaacaaaacaaaaccaattccagcacctagcaagtagagacaagtggatctctgagtttgaggctagcttagtctacaagtcaagttccaacccgacaagggctacagagtgagaccatgttccaaaccaacacctccatccctctcctccccccccccccaaaaaaaggaaagaaagatgcttttagcaatcctgaggtgatcctggctctcttgttttatcaaacaagactgggcttcactatgtagcccaggctagcctcaacttcctgttcctctttcttcctgtcttggtttacttttttttgttgctatgacaaaatatcctgacaaaagaaacctaagggagaaaaggagctggccacagttgcaagcagggtccatcacagtggcgggggcttggggcagctggccatattgtatccatagtgaagcaaagcgttgctgtgctcaactccccagctccccctcccacacccctctttttaaacatttatttatcatgtgtgtgcatacatacatgctcgtaccatgttatgcatgtggagattggaggttagccctctggacttgactctcccagcatgtaggctcccagcggcaagcacctaacttgcatgctcacattctccttctcagaatcctagctcagagccacccacccacccacagctggtggctctatcccaccttggtttacatcatcagaataaccctccatgggcatgcccagagacccctctcccgagttcaggaattaccggactgcgccccattgccaggctgtgcttgccatcctgtcatctgtaagaactccacatgccctggttctgtcaggggccgttgtctctgaaggttctgcctagctctgagaaggttccagcacgaaggctggccgttgcagacgctcctgggtttctatcccttccattcccccctcagaatccatgtggggcccggggaggctctggggagaaatgtggagcagcgagcactcagggctgactgtcccttctcacctccaaaggtggtgtggcccctgcaagatcctaggaccgcggctagagaagatggtcgccaagcagcacgggaaggtggtcatggccaaagtggacattgacgatcacacagaccttgccattgaatatgaggtaggtgttggcagagcgttgcctcagggaagccaaggcaggtgcgctgtgaccagtaagtgacgtgtctgctgttgttctggagctcttcaaaggtctcggggctttgcgctcgtggctctgttgatccacagacaccctcaggaagtggattatgtgaccactaggtcctcctgtgtcattgttcttttgagatagggtttcatatcatgcaggctgtccttgaactccggatactcttgcttcagccattcgagcgttagagttataggagtgtccaccatatttgactacaagccatcctctcaggtcttcctgccctgtccacctcactggcttccagccattgctttatgagccttggcatgtgtgatcgagttaaggggacagaaggggacacccgtgtccccaggtgtcccttgttctgttgcgagatgatcattttaccctgaaatgaaaagttgtctgaaaagagacacactgcaggttgttctgagggagtggccaggacggggaaagtgtcacattccagagcctctgacctgaattgtgagtgaagggtgcagagaagaagagagctggacaccaagtcctgaaggagccagaatggtgccttaagtctcactacaaaaacaaggaagacaggaagggattggcctgtgtgtgtgggcatcctttgcctgacgtgcaggaagtggcagcagactacactgagcttgggtctggagagatagctcagcagttaagagcactgactcgtgttcaggggaccttggttcaatccccagcacccacatggctgttcacaaacatccgtaacaccagccccaggggatatggctctcttcaagcctcccctagtgtagcatccccaaggtgtatttgacatgacatacagacaaagcacccacataaaggggaaatttcaaaacaaaacacactctgaccgcaccaaagagcattcaggaaagttgaggggtgggagagatggcgcagtggttaagagcactggctgctcttctggaggacgtggattcaattcaatcactccagtcccagaggctcagacgccctcttctggcctttgttggcaaaattcccatacccataaacttttttgaagtttaaataagtaaaaatattcacatacagccaggctgtggtaactcatacctctaattctagcactcaggaggcagaggcaaataggtctctgagagttcaaggccagcttggtctatagagcaacaggccgagctacacaggggaaccctgtgttgaaaaacaaacaaacaaaacattaaaataaacaatatcaaagttaaaaaacaagtttgcaattttcttttttttttttcttttgaaaaagggctttgagtgtctgaggggcaagtggcagacacatgaggcttttcagggcagtgagggctgagccctctctgaagtccccagccacaggacaaagtaaaggccgcagcatgttccagccacagtgtttacagcctcgggcagcaagtggaacttagcccgagggacatggtccactcggtgctttcaagtatgggctcccagttcagaggccttagcagtcacggacacacactttggcttccagtgttcagatttttggcttggggacaatcagccaatgacgtctgtgtaaagtccaaattctgatggatgctgtggagagaggaaatgcggggaggggaggggtggaggaggtctttcgttttccttttttttttttgttctttgatttggccttttgagggaaaatcttttgaagctcaggttggccttggcgtcaccacctaagaatggccttgcatctctgatcttctgccaccttctaagggcagtgcttacaggcacgcaccttcacatctttcagaggactctcgtctcagaggaagtaacgtgagaacagagacctgaatggagcagcgagtgaagcttacgtgtctcaggaaagagcccctaggcagggcagacagaggccctgggctggccacagaccgtgggggtgggggtgggggtggtgcagtctcctgtgggccctggaccaccaccgcagttgaagaaagagaggttctttgtggctatggctgggggaaaggaagagcagggttgggaggcccagtgtctgggagagcagaacagactggaacaggagcttctgggcgccgacagtgacactctgtcagggccgaggtcacacctggctgcctggggaccagctctgcttcacagacatgtttggtctggctctggagagttttaaagaaaaggaaatgtggttgcagagatttaaaactcaggacttgtgcgagccaggcatggtggtacatgtctgtaaagccaagccggacataaagtcagcctggggagagatagcaagaccttttccccccaaaagaagtttatggaaactccacctctcttgaaaccccaaggccagggtgaaactttcccaccctctggagtggagaggctgagaggaggggcaagcttttgttcagagttcagacacacaggcttaattaaccaggtttacctcctcaaaagcatcaggagacccatcctctgaccagagcccatggcaggaaacgggggtggacagtgtgggtaaagttgcccatcccttgagctggacggagagcgggatgatgagtcgaagggaggaaagcgggatgatgagtcgaagggaggaaataaggctgcctggggcagaagagaggaagtgcatgctgggaagacagggcttcctataagtgctgctgatgtaaggtcatccttgagactttatatatagcacaggtcactctgggccttgggtagagggagttgctgctttttttttaaagatttatttatttatttattatatgtaagtacactgtagctgtcttcagacactccagaagagggcatcagatctcattacgggtggttgtgagccaccatgtggttgctgggatttgaacttcggaccttcagaagagcagtcgggtgctcttacccactgagccatctcaccagcccgagttgctgctttttaagccctcccacccattcattgctcagtcagtgggggtggggggtgggggaaagggccttcaacctttgagacacccttggctttccccagcttacccattcacacccaaggccctagcaggtgtgaatgtttggccttctgttaagaactcagggctggagccacacagggacatggggcatgggtcaacctacaatttccaggccacctcccaggacctccaggtgctcccacgatggcctcagcattagcatcagcatcatgtgtttggcagaaagctgcaggccagccacccatgtgccagagcttgggaactagtaccacgcaaagcagacttccaccagcaggggtcccgtggatcccaggggtaactggagttcccagcactggaactcctcctcctcctcctccattccagtgaacccaggatgggatgagtgggcagcctgtgatgaagaagggggaggggtcctttgggacctctgcctgcccactgtctacacagtgcccggggttatacagaaaggcccctgcgccagcttgcatctcttcctctcggcctccttgttttgtcaagccctgagctgggggccactgaggtcccatgaatcccaacagggttatcctgtctcttctttgccctcccttcccttgtacctagcctttctaaagagaagccaagaaggaagttgccaccaagtgatccccagccccctgggatgactcctactcttccagatgtgcaggcaagcttgtcagaattgctcacagcagttctcagagccagctctttcccaagccctcctgacccctcatccgtcctccactggactggactgaaggaggaggaaggaaagtcctcggggttccccgacagcccccactcctattctgcatagtctcatcttggggagcccaaggctttcactctgtctctctcctgaccaccgagaccttgccagttgctgggggacaagtagggagggagcagttgtttttcctttttactctctcagccttgcacttgaaggtatgatcctttcgtgcaggaaaacaagcggagattcctgtaacctgatcactgttgctcctatggctcgtctgaaacttttatttattattatttcttcttctcttcctcctcttttttttttttttttttttgagaagagaggggtggggtttgtcatgtcctgtgtgatccatccagactggacccaagcccagaagcagataccaccactcctagcttaagttgggatgaacctgagggctttgctgggtacatggttatgctaccaatccatgtccacagcctggtttgtctttttgttttggttgtttttcctttttactatgtatacccctatagacaaatcgctaactagtttaaaactatgtgctattttaatccttcctacttcccctgtttgaaaataagtgcctctcaaagctgagcgtggcctgtatgtgtgtagggtcagaggacaacttgaggccttggttctctccattatgtgggtttcagtgatagggctcaggctgtctggctttgtgatgagtgcttctacctaccccgtgacctccctggtcttcctggaatatttgtcctttcttttccttcccatgtttcagatgtgcataatgcgtggctatgcttgtgtggagtctatgtgcacactcccgtgcatccatgtagaggccccaggtagacgctggaaatcaccctcatcacctgtgcatggaggaaggtctctaacccagggcttgctagccagatcgctgtaaggatcctttgtctctgccctctgaggctgaatcaacaaacagggaggccaccacacctaccatttatggaattctcaaagagcaaactctgggactgagggcgtatgccaaaagtcccgggtttcttcctgaagagggggaaataaaaagaagactatgacccaagagtttcaggaaggatgtaaatttgtcattcctaaatggctgtgtgtacagacgtgtgtgcgcgtgcgtgcgtgcgtgtgtgtgtgtgtgtgtgtgtgtgtgtgtgtgtgtgtgtgtgtagtaggtgcctgggcacatgcagccttaaaggtgctgttggtatgttccttgtttgctctccagtttatttattgaggcagggtctctcagttgagcccagagctcacggatcagctagcctgggtgctgcagggttttctctgcatctggagtgctgggaatgtaggtggtcaccatacccacccaatattccgtgggtgttaggatccaaactctggtcttcatagctgcatggcgcccgagctgtctctccagccccattctgcacggttttaggatgacacgcacgagtctgttctctccttcagctgtgtgggaccagtgacttgaagtcaggccatcaggcgtggttggtgcctttacccactaagccattttttcaaccctgctttgttagttaaataatggtcttgggtttttcaagacagggtttctctatgtcctagctgctctggaactgactctatagaccaggctggctttgaacttaagagatctctgtgcctctgcctcctgagctctgggattaaaggtggcatgcctgacaataatgggtttcctgagaacgctcttatattcgcttttacaagatctttgatttgacatttttcatttaaagcatggtgtcgttggatgcttctctgaattgcctttaccctgctgaggtctcctttccctctgcctcttaccctttactctccggcagaagcaaaaccaaacaacagactgtgtttcctgtttggaatccctgcttaactttctgagtcctcttaaaattggtgctttgagccccagtcttctcgtatctaaaatgatggcatgggagggttaggatgtcgtttttgcggtgacagcacccacgtgcaaaaataataaaaatgaaccaacctaggcgtccgcattctatgtgcttgcttatgtgtatgtagttaggatcttccatggcatttaaaacatcctccgcactgtgctcctcagccacagaggtcaccagcttcctgtggtacctgctgtcctgacctttaatggtctcctagcagagttgctagcgggtatgttagggtgagacccgagatattgcaggattcctgttgtcctgccagaagtgcgaaggtgtgtctcatcagtgtctctgtgttcccaacacttttaagatttatttattatatgtaagtacactgttgctgtcttcagacacaccagaagagggcatcagatctcattacggatggttgtgagccatcgtgtggttgctgggatttgaactcaggaccttcggaagggcagtcagtgctcttaaccactgagacaagggctatgtacaagggtccatgtattgttgcggatggcctgtcctaagccccgagcctccgtgattgcacagcagaagccttggcctcctgtcgtcgcccagatgccctctagaaacggtgctctggagcccgcagctgcacgtgctgctcaggcttaggaggaagccctcgatgagtagtgaccaggcctcaaatgtcatggacactagcctggtctatgtgtgtcccagcacactcagaggtttgcacacacagcacaaccgtcgtggagggaaactccatccactccgaatgtctcaaagggagaggagaggcctgcttaggcaagccaaaaggaccggacaaagggaagctccttgttttgttttagggtttgggatggaacccaggccccatgcctactaggcaagcactctaccatcgagccacaccaccaaccctaagctacatcttaaaaatggaatatttagccgggtgtggtggcacacatctttaatcccagcactcgggaggaagaggcaggcagatttctgagtcaggactatacagagaaaccctgtctcaaaaaaaaaaaaaaaaaaaaaaaaaaacccggaatatttattttaaagggatagaatgtttcagccaagttaaaagctagtggttgagcttgcatccctttaagttgccagctcccgggtgttgcagctcattcaccagccactagatggcgcacgaacacacttaacagggtttcctggtgcctcttttgctggtccctgccttttcctggagatactgcaagcctgatgctgggctgttaatgccaccacctgtgccagagtctgacaagaacaagagcccgcaggaaggctgtgactggggacactcatggtcagcccagttcctggtgctggcacataccctgtgccactcacatcaccacatcaccctcaggaccagagatacaaaaaaaaaaaaaaaatcaaatcaaatcaaatcaaggactgtgtcctccgtgctgtgcttttctcattaggacctgtcacatgacaggcaaggactgtaggatggggccaagtggccttcacttctctcttcagcccactctgatcatcatctccgtctggcctctgagatgactcaccccacagccctcaggctgtgtgaagacctggtgggtttctgtgcaccactcttgttgctttctagttaacttgtatgtaagctaggtccccgttcatcttactctgtgtatacaggttctcaaaataccaagctctgggcagcccaccgtgccaggatttctttttttcttttttaagatttatttatctttatttatatgagtaccctgtagctgtcttcagacacaccagaagagggcatcgaatcccattacagatggttgtgaggcactatgtggttgctgggaattgaactcaggacctctggaagagcagacagtgctcttaaccactgagccatctctccagccccaggatttcaatatacgtgaaatcctcacatacatttcgtgtaatctgtctgagtctccagagctgtggaagcagtacctcacggagcaagagcgcccctttccctctgccagcccgaattaaagcctctgatcacataggactgtccccatccactctgtgcataaccgttagctgtagcccaccaaggtggtcctgggcaggtcaagctccaccatacccacagtgtgccctgcgccctgtgccatcctagcatgtgtctcttggcattcctgtattcaactgaaaacattgtcggtgtctccacaagccgagacttgaggtactaaagggcttaccaggttcccccggggtaggagtgaggttgggccgcccagtcctggagctggcatccccgacccctgagctctgtctcaagcattcaaggtaaaccatgcatggccaggacccagaaagaggccgtgaggcgctcgggaagcagcctggcccacagcacacacacacacacacacacacacacacacacacacacacacacacacaccactggaccagcgagtcggtcctatggtccagggaagaggaggatgctgggaacttgcagtagaagaagctctaatggatgggtctcctccaagcaaagaccccacttcctttggcccttcctgtgaccttggccttctccacagaggcttagggaagatacacaagagacagtcaactccaagtgattgaccctgtgattccctcacccaggtgtcagctgtgcctaccgtgctagccatcaagaacggggacgtggtggacaagtttgtggggatcaaggacgaggaccagctagaagccttcctgaagaagctgattggctgacgagcagagaggaggcctgactacccttgcctgctggaagtctgttttggggagaagcctagtagaactcccagccctcagctgtcatccttcctgccctgcccctctgttttatcctggtgggtcttgcctgtgacagcagaccctccaaacctaagagccaccagcacttcagagccagccctcagcccgggtggcctggagagggccagtgctgccactggtgtgggggtcattcttgtgcaccccctactgtgtgctcctcttgtgcacctactgtgtgcttcttccggggcttgttgccattcccctagatgctggagaaagcctgggccagcctgtagcctgaccgcactagtggtcgcccagtccccatctctgtggccctctgaagccccagcccccatgcatcagcctctggcacatttcctctcctgcctctgcttgaaaaggaaaccagaagccgaacaagtgagagtaatgtataattctctcatttttttgtaggtctctaataaagaactttatgtggtccttctacctcttgctgtgaagaacagagcccaccccatagcctaaatctgtcccttctattccttgtcccctccctgagttagctgggccttggttctgggtccctgagcaggaggaggagctgtgaacaagtcagaccaataaaaccaggtttgcactgcc

SEQ ID NO: 139 - DNA, 638 bp, Mus musculus
aagtgacaacaggagtgcccttgacgggcaggccggctgggctctgcatccctctgctcgcactgccgggagatggctcagcggctcctcctggggaggttcctgacctcagtcatctccaggaagcctcctcagggtgtgtgggcttccctcacctctaagaccctgcagacccctcagtacaatgctggtggtctaacagtaatgcccagcccagcccggacagtacacaccaccagagtctgtttgacgacctttaacgtccaggatggacctgactttcaagacagagttgtcaacagtgagacaccagttgttgtggactttcatgcacagtggtgtggcccctgcaagatcctaggaccgcggctagagaagatggtcgccaagcagcacgggaaggtggtcatggccaaagtggacattgacgatcacacagaccttgccattgaatatgaggtgtcagctgtgcctaccccccagcccccatgcatcagcctctggcacatttcctctcctgcctctgcttgaaaaggaaaccagaagccgaacaagtgagagtaatgtataattctctcatttttttgtaggtctctaataaagaactttatgtggtccttctacctcttgctgtgaag

SEQ ID NO: 140 - protein, 150 aa, Mus musculus
MAQRLLLGRFLTSVISRKPPQGVWASLTSKTLQTPQYNAGGLTVMPSPARTVHTTRVCLTTFNVQDGPDFQDRVVNSETPVVVDFHAQWCGPCKILGPRLEKMVAKQHGKVVMAKVDIDDHTDLAIEYEVSAVPTPQPPCISLWHSPASA

SEQ ID NO: 141 - DNA, 1132 bp, Mus musculus
ccctgaggaagtgacaacaggagtgcccttgacgggcaggccggctgggctctgcatccctctgctcgcactgccgggagatggctcagcggctcctcctggggaggttcctgacctcagtcatctccaggaagcctcctcagggtgtgtgggcttccctcacctctaagaccctgcagacccctcagtacaatgctggtggtctaacagtaatgcccagcccagcccggacagtacacacgatcctaggaccgcggctagagaagatggtcgccaagcagcacgggaaggtggtcatggccaaagtggacattgacgatcacacagaccttgccattgaatatgaggtagctgtgcctaccgtgctagccatcaagaacggggacgtggtggacaagtttgtggggatcaaggacgaggaccagctagaagccttcctgaagaagctgattggctgacgagcagagaggaggcctgactacccttgcctgctggaagtctgttttggggagaagcctagtagaactcccagccctcagctgtcatccttcctgccctgcccctctgttttatcctggtgggtcttgcctgtgacagcagaccctccaaacctaagagccaccagcacttcagagccagccctcagcccgggtggcctggagagggccagtgctgccactggtgtgggggtcattcttgtgcaccccctactgtgtgctcctcttgtgcacctactgtgtgcttcttccggggcttgttgccattcccctagatgctggagaaagcctgggccagcctgtagcctgaccgcactagtggtcgcccagtccccatctctgtggccctctgaagccccagcccccatgcatcagcctctggcacatttcctctcctgcctctgcttgaaaaggaaaccagaagccgaacaagtgagagtaatgtataattctctcatttttttgtaggtctctaataaagaactttatgtggtccttctacctcttgctgtgaagaacagagcccaccccatagcctaaatctgtcccttctattccttgtcccctccctgagttagctgggccttggttctgggtccctgagcaggaggaggagctgtgaacaagtcagacca

SEQ ID NO: 142 - protein, 125 aa, Mus musculus
MAQRLLLGRFLTSVISRKPPQGVWASLTSKTLQTPQYNAGGLTVMPSPARTVHTILGPRLEKMVAKQHGKVVMAKVDIDDHTDLAIEYEVAVPTVLAIKNGDVVDKFVGIKDEDQLEAFLKKLIG

SEQ ID NO: 143 - DNA, 1169 bp, Mus musculus
tgacgggcaggccggctgggctctgcatccctctgctcgcactgccgggagatggctcagcggctcctcctggggaggttcctgacctcagtcatctccaggaagcctcctcagggtgtgtgggcttccctcacctctaagaccctgcagacccctcagtacaatgctggtggtctaacagtaatgcccagcccagcccggacagtacacaccaccagagtctgtttgacgacctttaacgtccaggatggacctgactttcaagacagagttgtcaacagtgagacaccagttgttgtggactttcatgcacagtggtgtggcccctgcaagatcctaggaccgcggctagagaagatggtcgccaagcagcacgggaaggtggtcatggccaaagtggacattgacgatcacacagaccttgccattgaatatgaggtgtcagctgtgcctaccgtgctagccatcaagaacggggacgtggtggacaagtttgtggggatcaaggacgaggaccagctagaagccttcctgaagaagctgattggctgacgagcagagaggaggcctgactacccttgcctgctggaagtctgttttggggagaagcctagtagaactcccagccctcagctgtcatccttcctgccctgcccctctgttttatcctggtgggtcttgcctgtgacagcagaccctccaaacctaagagccaccagcacttcagagccagccctcagcccgggtggcctggagagggccagtgctgccactggtgtgggggtcattcttgtgcaccccctactgtgtgctcctcttgtgcacctactgtgtgcttcttccggggcttgttgccattcccctagatgctggagaaagcctgggccagcctgtagcctgaccgcactagtggtcgcccagtccccatctctgtggccctctgaagccccagcccccatgcatcagcctctggcacatttcctctcctgcctctgcttgaaaaggaaaccagaagccgaacaagtgagagtaatgtataattctctcatttttttgtaggtctctaataaagaactttatgtggtccttctacctcttgctgtgaagaacagagcccaccccgaggagctgtgaacaagtcagaccaataaaaccaggtttgcactgcc

SEQ ID NO: 144 - protein, 182 aa, Mus musculus
RAGRLGSASLCSHCREMAQRLLLGRFLTSVISRKPPQGVWASLTSKTLQTPQYNAGGLTVMPSPARTVHTTRVCLTTFNVQDGPDFQDRVVNSETPVVVDFHAQWCGPCKILGPRLEKMVAKQHGKVVMAKVDIDDHTDLAIEYEVSAVPTVLAIKNGDVVDKFVGIKDEDQLEAFLKKLIG

SEQ ID NO: 145 - DNA, 40010 bp, Homo sapiens
gcgcggcctcattagaccacgggttgcagccggagcggctgggaggttcgcgcgtttctcagggttcggtcggaggcggggaggccggagctgcgggcgtagggacctggcggctcctgaagcgcacgcgggcgggcggcaggtgtgcgcggcatccctgtcacgtggccgaagagcctggggcgcgcggaccctggcagggggcggggcgcacgcaggccacacccacttcaggctcccacccggtcgctggagaggggccaaggcctctggaaggtccaacctggagggtggttcaaaggggtgttgggcaccctcaaattaggggaaaattggggagtacgctctccttccccagggtggaggttactacaatcataagcggggagccggtgcccctgaggaaggagaccctgagggagataagatggaggggctcgggattccggggagccccaagtcccagcttgaaacggtggagtccgggcaaatgagctctgaggacggcttctgggcctggccgtgacccagattgcagtgagagttcccgcaggccccgcctctttctgggcctcgtgtctcccagccgccgggccgggtgcgaggccttacccctctgatctgctgcaggatgggcctctccgctgcggccccgttgtggggtcccccggggctgctcctggccatcgccctgcacccagcgctgtcggtgcccccgcgccgggactactgcgtgctgggcgctgggcccgcgggcctgcagatggcctacttcctgcagcgcgctggacgcgactacgcagtgttcgagcgggccccgcggcccggcagcttcttcacacgctacccgcggcaccgcaagctcatcagcatcaacaagcggtacacgggcaaggctaacgccgagttcaacctccgccacgactggaactctctgctcagccacgacccccggctgctcttcagacactactcgcgtgcctacttccccgacgcccgcgacatggtgcgctacctgggtgacttcgcggacacgctggggctccgtgtccagtacaacaccaccatcgcccacgtcactctggacaaggaccgacaggcctggaatggccactacttcatcctaactgaccagaagggccaggtgcatcagtgcaggtaaggccggtgccagagctcacctgcggaagctgggaccttccccacacgaaccacacaccttgattggccagtaggtatgggaggaatggacgaaaaagggtatttcgcttttttttttttttaagacggagtctcactctgtcgcccaggctggagtgcaatggcacgaggtcagctcactgcaacctccgcctctctagttcaagcgattctcctgcctcagcctccccagtagctgggattacaggcaagcaccaccacacccggctaatttttttatatttttggtggagatgagatttcacgacgttggccaggctggtctcgaactcctgacctcaggagatccacccacctcagcctccccaaatgctgggattacaggtatgagccaccgcacccggccttcaattctatttttgaaaccactctgtgatcaaagcattcttctgcaagccggcaggatccaagtccccagctgccctcccctggatggcgatcctcaccaatggaaggagcaggactttggaatcaagcctatctgtgtttagactctggctctgctgcttttaggagctctcaagccatgggcctgcagggcctgtgcctcctcacctgtaaagcaggccacataccacctccaggttgcttggaggagtcagaaagatggtgcacagatacacttagtacagggcctggtacagaattactgctcagtggatagatgtatctgtcagaggactcagaaaggggaaagtagaatgtcaggtttcatttcatcaccagcagtcatacctggtctgactgctatgtgcaaagttaggtgaattctccatttctcatactgtcatcttctcctctctcacagggcaaatttaacccccagtacagtgctagggaaaatactgtgagctcagggagaggcaagggcagagcctctcaagtgcactgggatgagggcgtaaacagatgaatgaatgaaaaatgaatgaatgaatgtcctattttcttttaggggccggcggttggagccaggcaggtgggtgggtgggtccagggagtggttttcacttagtggtcttatagctaagagactaagccatctttcctctgtccccgcctgcagcgtcctctttgtagccactggtttatcagtccccaaccaggttgacttccctggctccgaatatgcagagggttacgagtccgtgtccgtggaccctgaggactttgtaggccagaatgtgctgatcctgggtcgtgggaactcggcctttgagacagcagagaacatcttgggtgtcacaaactttatccatatgctcagccgctcccgggtccgtctgtcctgggccacccactacgttggagacctcaggtaggccacatccccgcatgtgtgttctgtgctgggagcccagagtgtggaaagagcctccccaaccctcccctgcccttcctgaccccagctgcactgcccagctttcctctgagtctctctcccctgcattctctgtgggctcagagccatcaacaatggcctgctggatacctaccagctcaagtccctggacgggctgctcgagtctgacctgacggatctggccatcctgaaggacagcaaaggcaagttccatgtcaccccgaaattcttcctggaagaagccagcaccaaccagagtgccgactccatcaccctcccccaggacgacaatgacaactttgccatgcgcgtgccctatgaccgggtaatccgctgcctgggctggaactttgacttctccattttcaataagtgagttccatgcggaaggaggtgggctctcctagcaaaccctcctgacccctccctaggggaacagggtggctgttcagtaggctggcgacagagctctcaggacagcacccaaagaatggatgtgagtgctgcctgatttccctccaggacatgagctctgaccattgagggtcccaggtggccctgaggcccttggtcctggagcaacaccagcagatcttcatcagcattgggagcctccacctgtgagttggaaaggccggctcagagagaatacagaggggaatttgctcgaaggcaatatagcgtagtggctgagagcacaggtgccggaattgtcctgagattctctgcttgccaaatctgtgacctcggcggaagttatttaaccacgctgtggcccagtattctcatgtctaaaatgggattcaaagtttgtttctcatatggttattgcgaggattaacataagaatatgcttggaggctgggtgcggtggctcacacctgtaatcccagcacttagggaggccgagacaggtggatcacttgaggttaggagttcgagaccagcctggccaacatggtgaaaccccatctctactaaaaatacaaaaatttaaccaagcgtggtggtgggtgcctgtaatcccagctactcaggaggctgaggtgggagaattgctggaacctgggaagcagaagttgcagtgagccgagatcacaccactgcactccagcctgggtgacgagactcttatctcaaaaaaaaaaaaaaagaaagaagaatgtgtgcagaggccaggtgcagtggctcatggtctcacacctataatcccagcactttgggaggccaaggcaggcatactacttcagctcaggagttcaagactagcctggacaacatggtgaaaccccacctctacaaaaaatacaaaaattagccaggtgtgttggcacatgcctgtggtcccagctactcaggaggccaaggtgggaggactacttgagcccaggaggtcgaggctgtggtgaactaagatcatgcctctgcattccagcctgggcaacagagtgagaccctgtctcaaaaaaaaaaagagatggctggtcacagtagctcatgctgtaatcccagcactttgggaggctgaggtgggcggatcacaaggttaggagttcaagaccagcctgaccaatgtagcgaaaccccgtctctaccaaaaatacaaaaaattagccaggcatggtggcacgtgccggtaatcccagctactcgggaggctgaggcaagagaatcgcctgaacctgggaggtggaggttgcagtgagccgagatcgcgccattgtggactccagcccaggcgacagtgcaagatctccatctcaaaaacaaaaaaagagagaggagagaaggaaggagagagaggggagaaagaaaggaaagaaagtgctgggagctaggtgcagtgatgagtacctagctactcaggaggctgaggcaggaggatcactggagcccaggaggtcaaggctacagtgtgctatgatcatgcctgtgaatagctgctgcactccaacctgggcaacataatgagaccctatctcttaaaataaagaaagtacttggcatgtattatgtgctcaataaaatgttagttgcttaagttatttatcattgtattttgaagggctattttatgaagcctagattttaaacattgctgccgactacctcgggaggtttggtatcaaagcagcatccagtctttcacttgtcttctgaccagggtgcagaaagacaaaggagaagctggtgtgcctgtccagaccctcctttccatcggcctcccaaagtgctaggattacaggcgtgagccactgtgcctggcctgacttcattgtttgtttgtttgtttgtttgtttgagacagagtcttactctgttgcccaggctggagtgcaatggcataatctcggctcactgcaacctctgcctcctaggttcaagcgattctcctgcctcagtctcctgagtagctgagattacagccattgcaccaccacccccagctaactctttttgtattttttcatagcgacagggtttcactgtgttggccaggctggtctcgaactcctgaccttgtgactcgcccgcctcggcctaccaaagtgctgggattacaggcgtgagccacctcgcctggccgacttcatctcttaaatggagatgataatacccacctcctggggtcatggtgaggtttaaatgagacgagaaatctaaggcactcagtgccagtaataagtgccactgtaataagtgcctcctggctgggtgcagtggctcgcgcttgtaatcccagcactttgggaggccaaggcagacagatcacctaaggtcaggacatcgagaccaggctggctaacgtggtgaaacctggtctctactaaaaatacaaaaattagctgggcatggtggcaggagcctataatcccagctactcgggaggctcaggcaggataatagtttgaacccaggaggcagaggttgcagtgagccgagatcacgccattgtactctaacctgggcgacaagagcgaaactccatctcaaaactaactaaataaataagtgcctcttacatagcagctattttcatgaacagccctttccactgacaggtccctcagacttaactcgggaaatgcattcggcaagaagtacccgctgattcgagctagctacgaatccaaaggaagccggggtctgtttatcctgggtactgccagccactcggtggactaccggaaatctgctgggggcttcatccacggattccgatacacaggtgagcccagctgagaaggcagaactgtccccagacggaaccactctcagcatcccagggtttataaatctactcctatgtccagaagcattaggggattgcttgtcagtagctcattgtcataaattgtcttggggaagtgacaacaggtttttgtggtctgacgacatgtttaggaaagtatcagataaagtgtaaaagtccacgcctgtagtcctagctacttgggaggctgaggcaggaggatcccttgagtccaggaagtcaaggttgcagtgagccatgatgataccactgcactccagcctgggtgacagagcgagacttggtctcaaaaataaaataaaattaagtgtaggccaggtgcaatggctcacgcctgtaatcctagcactttgggaggccaaggcaggtggattgcttcaggccaggagttcaagaccagcctgggcaacacggcgaaaccctgtctctactaaaaatacaaaaattagccaggtgtggtggcgtgcgcctgcagtcccagctactcgggaggctgaggcaggagaatcacttgaacccaggaggtggaggttgcggtgagctgagatcgcaccattgcactccagcctgggcaacaagagcaaaactccatctcaaaaaaaaaaaaaaaaatgtaattggattatatcagttctttttcaaaactctcagtaccaagggtataaattttctgccaacttgagaatgtttacaaagaaaatactaaaatatctcttaaaaacataattctatttattgcactaaaataatccccaaccaaaaattgatacttgtgattttaggagtaaatgggaaataaaaaggaagtgagagagatgaattcacgcatgttgggtgacttcagtgggctgagcactgaacacacgaccctggcagggccgccagcaccccgaaaggtgggtgtgaaatctccattttcctcaagagtgtaaaactctgaggctcagagttttggtgattttctcaccattatgggaattaaactccaaggcccaggagctttcctgaaagacactttctacaaaggtcttctcttctttcatagaaagcaaactggtgccctttctgtggagaggagtctaaaatgttagatgtggccaggcacggtgggtcacacctgtcatcccagcactttggtagactgaggtgggtggatcacctgagggcaggagttcgagaccagcctggccagtatggtgaaatcccacctctacttaaaatacaaaattagccgggcatggtggcgggcgcctgtaatcccaactactcgggatgctgaggcaagagaatcacttgaaccttggaggtggaggttgcagtgagccaagcccacaccattgcactccagcctgggcaaaaagagtgaaactctgtctcaaaaataaataaataaataaaaattagatgttcctgctcctgtggttaaccttctgagaaggacagggtgttggttgaaattcactcagtgaggcatacagtattcagttaggtgagtctatttgaaagaatggagtcataatcttacagctgagctttaaaaaattagtattattattttttttgagacagcgtctcttcctgtttcccatgctggagtacaatggcgccatctcggctcactgcagcctcgacttcccagactcaagccatcctcccacctcagccttctgagtggctgggacttcaggcgtgcaccaccacacccagctaattttgttgtttttatttttgtgtggtagagacaagttttcgccatgttgcccaggctggtctcaaactcccaagctcaagcgatccacccacctcagcctcccaaagtgttgggattacaggcatgagccaccatgcctagcctgagcatcaaaaatgtgaaaatgtagggaattacggggagtaatctttatattctgccactcaaagacattcaatatttatatttcttttttctttttaaagacagtaaggcaggctgggcgtagtggctcatgcctataatcccagcattttgggaggctgaggctggcagatcagcttaggtcagaagttcgagaccagcctgaccaacatggtgaaaccccatctctactaaaaatacaaaaattagccaggcttgtaatccctactacttgggaggctgaggcaggagaatcacttcaatccaggaagcagaggttgcagtgagccaagatcgtgccactgcgctccagcctgggcatcagagtgagactctgtctcaaaaatcataatacaaatgaagacggtaaggtggactttattccaggttagaggactacaataataagtgtagggaccactgcagaggggtcttacagtacgggcaaaggattggactcaattctgggagtcggttcctcctggaacccaggaggcggaggtcgcggtgagccgagatcgcaccactgcactccagcctgggcaacagagcgagaccctgtctcaaaaaaataaaataaaaaatatttaaaaaaagaacttagagacagatggatttaggctgtgaaagagagggcgaaatcaaagatttctgtaggcgcgtctctgatggaaacagagctgtgaagggggggaggtttctggggaaggctccgtgtcggacttgacgttccttgtgtgaggtggggccggtgggactcccacgtgcagatggcctgaagcaggggcagatggactctggcctggagaccaactccagctgtgctcactcctttgcctgttgtcttggccgcttttacactaggggcagaattgagcagcatcactgagtcgtgtatgacccacaaagcagagaatatggattgtctggccctttccagaaaatacctgctggccctgctctaaaggcagctgccatctcctcccctcatgtgttcaccacctaggcgtttgcgctgggccatggagaccagtgtgtatggcgttctcaggggtcaatgaggcctgggcatccctcccagtgaccagagataaaatggtaagtgcagcgtgccgttcctccctctggctgttccagtgcgtgctgttcaccggctcctggagcaccgccaccacagcgtcacctggcccgccactgagctccccatcacacagctgaccagctccatcgtgcggcgcgtgaatgaggcttctgggctctaccagatgttcggtgtgctggccgatgtcatcctgttgaaggagtgagtagcccgtccccaccctactcccctcggcccagctttcccgacgtgctgcatagcgcttctcttcctattccaggtgtgaggtgcccagttctttcctaagatgaaggctgctgtggggaacatgcctgttctggggaaaaacaatgacattaactctacagacagtcctgtgagtggccacgggcacattagtgagcctctctgagcccttcttcctcatctgcaaaatggggataattgtgcctaccttgcagcagtaaaggaaggagtaaaggtcacttgtggaaagtgtttggcatcacgtggatgagcagtagtcagaggcagccacgtggatctcagagctccctcaggccagggccttgccggccaccatcgtcagagtcaatttagtgataagcagcagatcccagaggatggacagttcctgagaaggaaacggtgcagagcacagaggggtgaggggcggggggagacaggtggcagggagaagcaagggagcaaccttcagtcagagggaacagcccgatccaaaggcagggcgtgctatagcacaccaagttcagggacatgcaggtagtgcagccgctttctgcacaaaaccctcgcatcaccctccatgcccctgcccctcttttttttttcttgagacagtctcgctctgtcatccaggctggagtgcagtggtgcgatctctgctcgctgcaacatctgcctcctgggttcaagcacttctcctgcctcagcctcctaagtagctgggattacaggcacccaccaccatgcctggctaatttttttttttgactcagagtctcactatgtcttgcccaggctggagtgcagtggtgcgatcttggctcactgcagcccacctcccaggttcaagcgattctcgtgtctcagcctcccgagtagctgggattacaggcccatgccaccacacctggctaattttgtatttttagtagagactaggtttcaccatgttggctaggctggtctcaaactcctgacctcaggtgatccacccgccttggtctcccaaagtgctgagattacaggcgtgagtcagcacgcctggcacccctgtctcaacaccccacatgcaaaccatgggcaagtcttgtcacctctgccttcagatgatgtctggagcccaaccagctctcacctgctctaccaccaccacctcggtcccgatcaccaggctgtatcacctgcacccatacaacagccgccccacttggcctggcgtctgttctcagcacagtaaccagagtggtccttagaaacctgaggcacgctgatcccagctctgctcagtcctcccaagcaaccagcagtgtcacctctcgggccagacgactcctcacgtctcgtcatgggaggcgcagccctccttgacctctcaaggcctccggccccctctcctgccctctgcctgctgttcactcccctcagccacgtcggcctcttctgttccttgaacacaaagtgctcacatactcctcagggctttttcctgactgttctctctgcctgggacactctttccccagatatcccattcaggttacatggaattttctggtctctaccccacatgtgcgtgagagctgagctgaaaaagtaatgttaagtgaggggtgtgctgcttgattgacgctccttagagggggagatacacacgcacacacacatgctcacccccgggctgcacccctcacctctgccacagcactgagggcctcccccgcgttgctgttctcccaggaattccacggcctttgagtacctggaggagttccccatacagatgctggcccagctggagacactcacagggaggaaggcaaagcacgggctcttcgtcatcaacatggaatatggcagaaatttctctggccccgacaaggacgtcttctttgatgaccggtctgtggggcacacagaagatgcctggcagtctaactttcttcatcctgtcatctactactatagatacctccccaccggtgagcaggtctctgcccttccccaacctgtgggctcctcagacctcaccgtctgcaaggttgtcacccaccctgaaaccttcacacacatgctcagctgacaggtgggatggctgcgggactctgcctagagaccacttgggcagaaggtccgagaatgatgaacgatgcttccagattctgacacataccgtgactggcacaggccatgcggggggtgtcgtgctctccgccaggcactgtgtagtaagagggacacggccctgctgcaggtctccagaggcggctgactgtggtggggcgggaggggtctgaagagtagagggaactggagctggttaacacagtacagagaaactgggcaaaatccctaggcctgtcattttgtcactgtgtgaccttggaccattacttaacctctctgagcctcaacctcccctctgtaaaatggggattacaacagtacctttcttgtagggttccatgaggttaaacctgacagtgtacacagaatgccagcccactgcaggcacagagtagctaccaataagtgaacaacctcgggaacgcaccccctgcttcagagcttgaagggcagtcaggtagaagagggtggtttaaacaggggttgttcccaaaggcagaagtcgtgtcagcaggtagcagtgacgggtgcaggtctgtggtcagtataaggaggcactaagaggctgggcatggtggctcatgactgtaatcccagcactttgagagaccaaggcaagcggattataaggtcaggagttcaagaccagcctggccaaaatggtgaaaccccatctctaaaaaaacatgaaaaaaatgcaaaaattagctgggcatggtggcacatgcctgtaatcccagctattcaggaggctgaggcaggagaattgcttgaaccgggatccgggaggcagaggttgcagtgagccgagattgtaccactgcactccagcctgggctacagagcaagactctgtctcaaaaaaaacaaacaaacaaacaaaaaggccgggcgcggtcgctcacgcctgtaatcccagcattttgggaggccgaggcgggcggatcacgaggtcaggaggtcgagaccatcctggccgacatagtgaaaccccgtctctaataaaaatacaaaaattagccagcgtggtggcgtgcgcctgtagtcccagctactagggaggctgaggcaggagaatcgcttgaacccaggaggcagaggctgcagtgagccaagattgtgccactgcactctagcctgggagacagagcgagactctgtctcaaaaaaaaagaaaaaggaggcactaagagttaaagctgttcagtgggggaattggtcacctccaaattcaggtttcccagaatagcgacggccaagtcttgactcgatggccatctgactgggacaccacagaagggagcccacaccagggagaagctgaactagatgagtgctgagacccctcgcctctatctgagtcttctcagagaaaggccagtttgaaagcagccacagccaggcgcagtggctcatgcctgtaatcccagcactttgggaggctgaggcgggtgggtcacctgaggtcaggagtttgagaccagcctggccaacatggtagagactagaaaccccatctctacgaaaaatgtaaaatatgagctcggtgtggtggcgggcacctgtaatcccagctactctggaggcagaggcacaagaatcgcttgaacccaggaggtagaggttgcggtgagcctaaattgtgccactgcatgacagcctgggcaatagagcgagactgtctccaacaaataataatacaaaataaaaagcagccacagtagatctcagtccatgtgagtcttagggaaacgccagcctcacgttgttagcttcagcactgccttccgaaaccacaagggaaaagcctagttcctcttcctcatggcagcctttcaaatatctgcaggtggctcttgaacagtctgaccacagcccagcataggaggctgtcgggaaagccgagcacgagtgaacgagggaagtgtttgggctgtgtgggatccgtgctgtgtcggcccgaggaggggaagcccagcctcacagctctgacatggccccctctctcctccccacagaacaggaggtgaggttccgccctgcacactggcccctgcctcggcccacggccatccatcacatcgtggaagacttcttaacagactggactgccccgatcgggcacatcctacctctgaggcgcttcctggagaactgtttggacaccgatttgcgaagcttctatgcaggtaacttaagctcccagaaagacaaagggtctgagctccaggttgaagaaaggtcacagagacccaagacccgtggagtttcaggacccatatctggaaatccaaaccccagactactgttcccgacaatgccgtgggttaaattacaactcacctaaaaataatggataatatgtcttcttttttttttttttgagatggagtctcgctctgttgcccaggctggagtgtagtggcgcaatctcagctcactacaacctccgcctcccgggttcaagcgattctcctgcctcagcctcccaagaagctgggactacaggcacatgccaccatgcccaactaatttttttattttttagtagagatggggtttcaccatattggccaggctggtctcgaactgacctcgtgatccgcctgcctcagcctgctgaagtgttgggattacaagtgtgagccaccgcacccagctgataatatgtcttttcaaaaggattagcagggccaggcgccatgggaaggcgccagggccaggtatgggtgggaagacagagctggagcaggatgggaggcctgtttagagacactccaataaagcttggatctcagtagggaagctgggagccaaaaccctccaaaggaggagatagatgacatgcatggttttggccctagatagagtgggagagaaaaatctctgaaaatattcaaccagtaggccctgcttatgtaaatttggggccaaacttcatgagatcattgagctatagaaatcacagaagcaaatgcacaccttctcaagaaatacacttttaggccaggtgcagtggctcacgcctgtaatctcaacactttgggaggccgaggtgggtggatcacctgaggtcaggagttcgagaccagccctggccaacatggtgaaaccccatttctactaaaagtagaaaaattagctgggggcagtggtgggtgcctgtaatcccagctacctactcgggaggctgaggcaggagaatcgcttgaacccggaaggcggatgttgcagtgacccgagatcatgccactgcactccagcctgggcaacagagcgagactccatctcaaaaccaacaacaacaaaaatgccagggtgtgtgagggagtgaattcccaccctgagttgtgggtcccaccaatgcattgtcccaggccctttagcctcctgtctcccactttctagacactgtttgactgtacaggccactgtgtgctgctgccttggactggagagaatccgcccagcaggcggccagctggcatagtggcagccgtccctctgttactgtagctgatgtgcagctgttagtgctggccccagattctgctgagcatctgagccccctgcagaagggatgatgttgtcagaaggtggtgcctgccaaacagccaccttgctgccctcccagtcttcccgctgtcctcttcctcatctgctctcttacccgcttggagaggcttgccatggcctggcctcccaggggcctccatgctaagagtcagaaataaacaggaagtcatatttctggagcacctttcagcctggtcacccatggaagcctcacgacatcctttgtactgtgcccatttttcacttgagatagaggggctcagggaggcaagaaggctcgctcagagttacagaaggactccagcccattcctgacactctgtctgcccttgtctctaactccctcagaaggctgagcccatatctgtgtcagctcttctgtttgtttaaagtcttataagtacttggctaaatgactttttctcactgtattagtctgttctcacattgctataaagaaatacctgagactgtaatttataaagaaacaggtttaattggctcacagttctgcaggctgtatggacgcatggcagcatctatttctggatgctggatcacgcctgtaatcccagcactttgggaggccgagaaaggcagatagcttgaggtcaggagttcaagacaagccaggccaacatggtgaaaccctctccctacttaaaaaacacaaaaattagctgagcgtggtggcgggcacctgtagtctcagctactggggaggctgaggcaggagaatcacttgaacccagaaggcagaggttgtagtgagctgggatcgtgccactgtactccagcctgcctgggcaacagagggagactctgcctcaagaaaaaaaaagaaaaagaaaccactcctgtgatgcagtcacctcccagcagccccacctccagcattagagattgcatttcaacatgagatttgggcggggacacagacccaaactatgtcacccgctttccctaccttcattctcattcccacgaggaactcccagacctagcggttgttcctttcagtagcttctctctttgcatggcttcttttggttgtttcttcatatttctttttctttcttttttttttcgagacagagtctctgtcacccaggctggagtgcagtggcacgatcttggctcactgcaacgtccgcctcctggattcgagtgattctcctgcctcagcctcccgagtagctgggattacaggtgtttgtcactacgcctggctaatttttgtatttttactagagacggggtttctttctcattatgttggccaggctggtctcgaagtcctaacctcaggcgatccaccggcctcggcctcccagagttgtcggattaaggcgtgagccaccacgcccggccgtttcttcatatttctacatgataagtatccacagctatcttatgattgaccaaatttgattcatgcaccagctttctgttgtgggacagatgaggatatacccgtttttctttatcccccacactgtttagatcagaactttgcacatggtatttgcaactcaaatgttgttgagggactgcgtctttgcaggcagatctgagctcacagtggaactgaccactgagttcccagccgcaccaggccgagggtctgctcatgaaggtcggagccccgcccccagtgtggttgcctgcagagcccggtgctcagccctgatgtctgggagctgaggcattgctgtggtttgcttttattttggagccttgttcttccagagtgtcaaggcagccccctgccctggagcctcgtggagggtcatgattcatgacctactcaggttggacgtgagatgcccagaaaggtcagctcccagtttcaagggatggaagataccaggcaaggcctgcagtgaagcccccacacctggcattggcagctcccctttctgcacccctccccacatgtcccagcctggctcattctcctcattttgcttttgtgtagagtcctgcttcctgttcgccctcacgcgccagaagttgccacccttttgccagcaggggtacctgaggatgcagggactcgtgagtaccgagagcctttggcagcacagagtggagagcaggctcctgcgggactatgcccccacaggcaggcgcctggaggacagcagccagcagcttggcgaccaagagccactaggttcccccctggctccagggcctctggctcagtccgtcgatagcaacaaagaggagctctgactgtcccttcctaagctgtgggcacagtggccaggcctccccacctaggcccatggtcagtccctctttccccgcaacctcacactcccgccaatgcgtgattgccaaagaccactcagatcatggcagtgtctgcagcaaagccaccagatggcacgtgagggctgaaagtcggggatgcggtggtctcctccctcctgtcagggggcagaagggcatcctctgccaggtgggagctgccttccccagcccagtttgtctgcaatggagctgtcgctgagccccaggccagcccagttctgccccgtctcaagtgctcctcttccttccaagcccctcctcagatgggcctgcatcccgcctgtggagtgcttcacaggggaaacccatccgcatcttaagagtttgtggcaagcgctttaaaacaaaagctctgatatcctcaacaaccacaacgggcaggtgggattgttgccccagatgactgctgaagacaccagctgtgggatgtcaagtaattccagggacccccagctgggagtccccgtctgtgtcacttgccacacactgcctcaacctccccgccccattttcagcagggtttgggcttagctacagagcccaagagggtcagccctgcttatcatcataggcccagcaggctgatctcgagcagcgataggacagctccctgcaaagccatcttagcaactttctcactgagaagcaggattcagagctgctctccccagttgcaccccctgactcatcttccagctggctcttctctcccatcctactcccttctgtctccctgccctctgccatcctgaaccatgccttgcttctaacctgcctggtcaagttttgtgaaacttatcctgctgtctcgggctggcacccatatgtgctcaccatgtgtaaggtgacatttccaaatgcctttgtgtgataatgatgatgaatttggttcctagtctcttcttcattgcccttcctcaccagcaatctgcactttcccatcaggcgtcttagtctcatttgtaagtgcataagataatcacagtgatttttcaaagcccaggatcataagtgattgctttttcactggttcttactaactcttcatgtatccactcagaattccaaggacaatcccagcactctgggaggcccaggcaggtggatcacctgaggtcaggagtttgagaccagcctgaccaacatggagaaaccctatctctactaaaaatacaaaactagccaggcgtggtagcacatgtctataatcccagctactggagaggctgaggcaggagaatcacttaaacccgggaggcagaggttgcagtgagccgagattgcgccattgcactccagcctaggtaacaagagggaaactccatctcaaaaaataagttaattaaattaaattaaaataaaacatgcgctgggtacagttgcttacacctgtaatcccagcactttgggaggccaaagtgggccgatcacctgagctcaggaattcgagaccagcctggccaacatagcaaaaccttgtctctactaacggtaaaaaaaattagctgggcatggtggagcatgcctgtcatcccagctacttgggaagctgaggcaggagaattgcttgaacctgggaggtggaggttgcagtgagcagagaccgagccactgtactccagcctaggtgacaaagcaagacccacagtaaagcccccacaccccatctcaaaaaaataaaaaataaaaaagaacaaagtatgctacaacaaaagtgaaaagagaaaaagaattccaagaacccgggctttctggatccaaagctctttcatggggacgtcctcttcccctcttggcttggtccagactttttctttttcttttttttttttttgcaatggatttcgctcttgtcacccaggctggagtgcaatggcacgatgtcggctcactgcaacttctgcctcccgggtctaaacaattctcttccctcaacctcccaagtagctgggattacaagcgcctgccaccacgcccagctaatttttgtatttttagtagagacagggtttcaccacattggccaggctggtctcgaactcctgacctcaggtgatccacctgtcttggcctcctaaagtgttgggattacaggcatgagccaccacgctcggcccagtccagactttttaactacctggccccactgcagacacagttccctctagtccttcccagagttacaagaagagaactccagtagccttattctgtcagggacgaattgtttaccccatgataatgtaggatatcataaattcttcttcaaaggttttagcctgtaatttgttaagtacattgagttctgagatcctctccaaagaaccaatgtatcagtatgttcagctcacctgttctttgttcttcattttaacttttaatttcctcattctttatgtctccttgcccctagtttcagtaaacaatcccctcctagcctctgtcacctgctctgacctgagtcacctttagtcacctggtccgtaaccatctttcctgtctaaacttctcaccccaccactctggcttatacccctgctctctttaaaatagccagtcagaattagcttagattgtgcggtccaaccctagcccataggggaacaacacagcagtagggggtacctgcatcagggataagaacccattcccctcccttgttccggtgtgctctcgccattgcaccatccatgagacgcactcttgtatagaagtaaaattgccttgctgagaaaatgtatgtttgagtgctatttcttttgtggcactgaaaatttatttctaacaaatttggggtctcatttgggattcccatcctcctctgaggagggtctagacctctcccatgaggaggcacgtcccactgccttgttgcggtggccacaggggtaaggaatcgagaccaaccagtgtgacgaataaacctatactctcagcaaggcagaaagaaacgggctggcgacctgggggaaaggatcctcatgtaccacagcgaccaagtaagtgtgcagagaccaagctaagaaacatcgcaggggtgacaaagtatttccttggtggtcaggatattctgggggttgaaagtgtgcatgaatgcaaggagcctccagcaggtggggctaaaggataggcgagacatctccaacaggggagattgagcttaaccaggacccaagatgggaaatgccccaagtaaggtaagagataaaaaggagaaagctagcaacagtaatattcccccaggcctaatgttaaaatgttagaaggataatgaaaggaccaaaaacaaaagcagctgctgtcccagacccttctcctatctctgatgtcccctttcttacaaccctgcctcttgagaatcgtcccaagagcccactcactaccgacctaagtacctttcccttaaaggacttcaacgtgagatagagcaatgtaaaaaagatattcagaatttccctttcccctcttctcgggggaagaaagagacatgatccatagagctgctatgggagcctaggaacacgaacaccctcctggccaaaacgttcctacagcagatcaaaaaactcccacccaagacccccagtgggacaataacaacgcagcccaccgagaaaatatgcaggaccttaaggaattgataataaaggggattaaagcatcagtaccccgaggctgggcgcagtggctcacgcctgtaatcccagcactttgggaggccgaggcaggcagatcacaaggtcaggagatcgagaccatcctggccaacacagtgaaaccccgtctctactaaaaaatacaaaaaaattagctgggcatagtggcaggcgcctttagtcccagctactcaggaggctgaggcaggagaatggcgtgaacccagaaggcggagcttgcagtgagccgagatcacgccactgcactccagcactctagcctgagcaacagagcaaggctccatctcaaaaaaaaaaaaaaattggtaccccgaactcagtatcttacccgaatatttgatatacagcaagggaaagatgaagggcctatagaatttttagatagattaaaggaacaaatgagaaaatacactggtctaggtctcaaggatcctcttgggcagggaatgttaaaacttcattttgtcactaacagttggccagatattaacaagaaattacaaaagatagagaactggaaagataaacctatagaagagcttctaagagaagcccaaaaggtatatataagaaaagatgatgaaaaacaaaagcagaaggcaaaaattctgctgtctaccatacaacaaagtacccagggggccagaacctataaagaacctagactgagggctgggcgcggcggctcacgcctgtaatcccagcactttgggaggccaaggcgagcggatcacgaggtcaggagaccaagaccatcctggctaacacggtgaaaccccgtctctactaaaaaaaagcagccgggcatggtggtgggcgcctgtagtcccagctactcgggaggctgaggcaggagaatggcgtgaacccaggaggcggaggttgcagtgagccaagatcgcgccactacactccagcctgggcgacagagcgagactccgtctcaaaaaaaaaaaaaaaaaaaaaaaaaagaacctagacccccactctccaggcaatatatagagtatgaaagagtaaagccaggagactcaaaagtaaagaaaaaaaaaacttagaggagagagaaagactgacagaacagacagagtcaaagagagagagacaggcaaaaagggaaagagagaggcagagagaaaggcaaagggagagagtcaaagaggaagagagaggcagagagagaggcaaagagaaagagtgagagagaaaaagaggcagagagggagaggcaaagggagagaaagaggacaaaataaatgtttcagattaaaaataggtcacttcaaaagaaaatgtcccaaatgggaaaaagaacaaaagtcatatataaaagcaaatcagctaatattaaatttctgtttattccagaggcaggaacaaacctattagagagatttaatgctaaaatttggcttaggcctctatattaatcagggaagattcctcccctccctaaacttgctccccaccacagacaaagaactcattcatcccaaggtatggtcaaaagacgagaatcgaggaaagttacagattactcagtttcatgttaaattacaaacccctggggaagtagtaaagagaaagcaatgtatcctattcctttcaaagccgaggtaaatttaaaacctataattgataattgaaggtcttctccgtgatggatttcttaaaccctgtatgtctccctataacattccaatactgcctgtaaagacgccagacaggtcataccggttagtgcaagaccttagagctatttttttttttttttttttttgagacagagtcttgctctttcgcccaggccagagtgcagtggcactatctcggctcactgcaagctccgcctcccgggttcacgccattctcctgcccagcctcccgagtagctggggctacaggcgtgtaccaccacgcttggctaatttttgtatttttagtagagatggggtttcaccatgttggccaggctggtctcgaactcctgacctcaagtgaactgcccgccttggcctcccaaagtgctgggattacaggtgtgagccaccacgcctggcaccatgtttgtttttttaaaaagcagatcaccacccactaaattaattttgcaaacccactgacgtccatatcctgcagtttgaaaaacactgcaataaatattggtaggaggtagaagttttacccttagcccaggctgccagtcctggcttccttccctttgcctctcagctgtgccctgagcctgcttgtgactaagccagacccaggccagctcagctctagctggacagaggagccaccatgtagctgagagcccttttgtagcgcgccgagagctcagccttctctgtgtctctcaggctttccctgcaggagtcatcaggcagcaatgatgtggattctgtctctactgcaaccctcagcccagctatgagaaaggcattcttcccattgctcagatgagaagcctgaggccgatcagggtgaagtgactatggcataaggacaaacaggactggtccgcctgtgaaattcagaatgtgaattaggcaggaaaattggctctctagaaaatactgtggaagtgctgaataggattgataggtggctgtggaaaagaaagtgctagagacacagaaaaccgatacaaaaatgggcagggcggccaggcgcggtggctcacgcctgttatcccagcactttgggaagccgaggcgagcgataacttaaggtcaggagttcgagaccagcctggccaacatggtgaaatataaaatttctgtaccaaaaatataaaaaattagccaggtgtggtggtgctcgcctgtaatcccaagtacttggggggctgaggcaggagaatcccttgaaccctggaggtggaggttgcggtgagccaagatcatgccactgcactccagcctagctacagagcaagactccgtctcaaaaaaaaaaaaaaaaaggctgggtgcagtggctcacgcctgtaattccagcactttgggaggcccaggtgggcagatcatgaggtcaatagatcgagaccatcctagccaacatggtgaaactccgtctctactaaaaatataaaaattagctaggcgtggtgaggcacgcctgtagtcccagctactggggaggcagagggagaagaatcccttgaacccaggaggcagaggttgcagtgagccgagatcgcgccactgcactccagcctgggcaacaagagcgagactctgtctcaaaaaaaaaaaaaaaaaaaaaaaactttgatcaacaatttggaaactgcctgttcttttaaaaacgctctttcagctgctgctaatccgagtgtatattcaggacaacttgaatctctgctccgagttgcagtcttcgaacttgacccaaaaaaactccctgcttaaattaggctcgcctcagttttcatttgttttcctttaggcggacacagacgagggccacttaaaggatggcccctaaactcccggttgagttcttttacatataaagggcatcatgcctttgaggagcttagctttacatattaaatggagaaacagaacctgtcaacatctgtaggaagtggacagcgccagttataaacaggaggccaggcaaggtggctcacgcctgtaatcccagcactttgggaggctgaagcgggcggatcacttgagctcaggagttccagaccagcctggccaacatggcgaaactccgtctctactaaaaatacaaaaatcagcccggcgtggtggcgcgcgcctgtaatcccagctacctgggaggctgaggcaggaaaatcacttgaacccgggatttggatgttgcagtgagcggagatcacgccactgcactgtagcctgggagacagagcgagactctgtcattaataaataaatatatgtaaataaaataaagcaacaagagtttgcaaaatccaaaaccacggggacttctcaactgccttttctcccttaagtaccctccattgctacccctgctccatcacctcctcttccggtccctcctctagggcccgcccaccccttccgtttccgccccgccccgcccccgccttcgcccagaccagggcccgcccgcctcttccaatccgttccccgacggcctgcccattgcttccggtccgtagctgaggccccgccccttcaactgtgcctcagcccgccattcccattggcggaaaatcccagacgcccctcaaattggagagggacagatgggcgctgtggctcacgcccgtaatcacaaccctctgagaagccgaggcgggcggatcacgaggtcaaaagatcgagaccgtcctggccaacgtggtgaaaccccgtctctactaaaaataaaaaaattagctgggcgtggtggcgcgcgcctctagtcgggaggctgaggcaggagaatcgcttgaacccggaaggcggaggttgcagtgagccgagatcgcgccactgcaccccagcctggcaacagagcgagactctggctcaaaaaaaaaaaaaaaaaaaaaaaaaattggagagggacgctcttccgcctgcctgtacccggaagtgacgttatgtacgtcccccccccgaggaagtgacgacaggcgtgcccttgacaggcagggagggctaggctgtgcatccctccgctcgcattgcagggaggtaggagccctgtgggggtggctcgaggtggtgtcgcggctgaggcatgccgcgagcgcgttcctgcgcaggctggcggccgggcgggcggggggatctagctcgccggagagccagggtccctggtgatgtccgatttttcccagttccctccacacatgtcccttctttattggttccctccagtacatgtctcttcgtttttggttcctctcacactcttagttcctccttgaattgttgcgtttcatcttttcagacgaccctgggttccagtgttggctgtcatttaatagcggggttactttgggcatgtcacttaacttacttgagcctcgtattccttcccttactcgcagtgtgggcagtacaatagcaacttcctggaagttgctgtaggaagaccaataatgtgtgtaaggtacttggtccttacatacattattaaatctgttggtttcttcctcccattcttccgttataatctaaatcccgatttctttttggttgtgaagccagttttcctgtccttctggtttgcctagctgttccttccctttgattctcattgcttcctcacttccacgctacaaatcttacatatgatttccttgcattttgcttccaactctgcctcttcctgagccctgagtactccccaaatctttttctagtgtgtcgacttccttttgtgtgccccagttcttctgcctctttccctcacagatggctcagcgacttcttctgaggaggttcctggcctctgtcatctccaggaagccctctcagggtcagtggccacccctcacttccagagccctgcagaccccacaatgcagtcctggtggcctgactgtaacacccaacccagcccggacaatatacaccacgaggatctccttgacaacctttaatatccaggatggacctgactttcaagaccgagtggtcaacagtgagacaccagtggttgtggatttccacgcacagtgagtattgggggtccacagaagactagggtcctacttgttcaagtatttattgaatgcctgctgtgtcccacggccatgttctatgctgctcatatgtagactcaatatacagactggtcaggcccagtccctgccctcaaggggaatgcagtctggtggaagacagacaagtgaacagtctgcaaagctgactgttagtgctgggaaacacatgttctgtttctcaatccccagaaagctcagcgtcatctttagcatggaccagagttggaaaaatatgactgtcaccttgcttttggtgtataccagttcctggccctgcagataagctgatgttaacatcctgccatgaaaaccgcaagaagggctggcaaaaagttatcagtgtcggccgggtgcggtggctcatgcctgtaatcccagcactttgggaggccaaggcgggcagatcacctgaggtcaggagttcaagaccagcctggccaacatggtgataccctgtctctattaaaaatacaaaattagctaggcgtggtggtgtgtgcctgtaatcccagctactcgggaggctgaggcaggagaatcacttgaacctaagaggtagtgtttgtagtgagctgaagatcgcgccattacactccagcctgggcaaaaagagtgaaattccatctcaaaaaaaaaaaaaaaaagttatcggtgtcactaccgtggtgcccaagcatacagggcataggaaggagtttcctttcagtgctatctgagtttgctttagagatatttaagtccctctggccttctgaattttagcctgggctttttcatttctagatctttggggcctggctagacacccaactacacaaaagctggacaaagccctctgaatgaggcatcctgggagaaaccagtgtagcataagttaaaaattcaggggccttcaggtcggacgcagtggctcacacctgtaatcccagcactttcagaggccgaggcaggtggattacctgaggtcaggagtttgagacctgcccagccaacatagtgaaaccccatctctaccaaaaatacaaaaattaatcgggcgtggtggcgggcacctgtaatcccagctacccaagaggctgaggcaggagaatcgcttgaacctgggaggtggaggttgcagtgagctgagatcgcgccattgcactccagcctgggtgacagagggaaactccatctcaaaaaaaaaaaaaaagaaaaagaaattgaagggccttctggtcaggtctctgacagattgtttcgctggctttccagttgtttctctgactcaccctgtggccttgggcaggccacttgatatctttgtgctccctttcttcacttgtaataggagataaggtcttgcacactgggtttttcagtgttatgagttgtttttgtttttcttcttttagagacaaggtctcactctgtcacccaggctagaatgtagagtgcagtggtgcgatcacggctcactgcagtctctacctcctgatctcaagcaatcctcccaccttggcctcccaaagtgctaggattacaggcatgaaccactgcgccaggcctgagggttttttttccttttttgtttttgagacagagtctcattctgtcacccaggctggactgcagtggttcagtcagctcactgcaacctccacctcccgagttaaaacaattttcctgcctcagcctcccaagtagttgggactaccacccagataatttttttgtatttttagtagagacggggtttcaccatattggccaggctagtctctcaaactcctgaccacaggtgattctctcccgccttggcctcccagagtgctaggattacaggtgtgagccattatgcccggcctatttttcagcatttaaaaccgtcaggcctggctgggtgcggtgtgcaccaccacacctgctactcaggaggctgaggcaggagaattgcttgaacccgggaggcggaagttgcagtgagccgagatcacgccattgcactccagcctgggcaacagagtgagactccatctcaaaaataaataagtaagtgctgagaataaaataggagttgtcagccaggggtttgtgaaaggtggaactgtcttggcctcctggtgtagtgagcattccagagaggccttccgaaatgaacaataaatgggataatgcctcattttgttcagtaaggaagtggggtggtgtgagttgttcattcagtgccaggcactttccttggtgccacatacatagagatgacagcaccaggcctgtcctggatgagcttccccagcgagaggggaatacctatgatcagggcagtgataatggtcaactcaggggctgtgggatcagagtagcctgtgggtgaaataaaacactttctcttttttttttttttttttttttgagacagagtctctgtcgcccaggctggagtgcagtggcacaatctcagctcacttcaacctctgcctcccaggttaaagtgattctcctgcctcagccttcctagaagctgggattacaggcgcacaccaccactcctggctaatctttgtatttttagtagagacgaggttttaccatgttggccaggctgatcttgaactcctgacctcaggtgatccgcctgcctcggcctcccaaagtgctggaattataggcgtgggtcaccgcacccggccaaagaaaacactttcaacacagctttgggttgtgatcgatcccagctgtgcttctctaatcttgcacaggtttcttaactcgtatgggcttcagtttctttggaaggtgtgttctctttgcagagttgaggggtgtgtttggtaaaagcagagaaagtgagccagggactggtgcgttgtagacgctccaggccattggttcccctccttttagttctgagtccacatggtgtttgaaatatccccacagcttccaatgcatgtttacccacattgccttagttgatctctcctaatagctttgagagccataatctctctttttcagatgaagaaactagggcccaggccgggcgcggtggctcatgcctgtaatcccagcactttgggaggccgagacaggcggatcacgaggtcaggagatcgagaccatcctggctaacacggtgaaaccccgtctctactaaaaaatacaaaaaattagctgggcgtgttggcaggcacctgtagtcccagctactgaggaagctgaggcaggagaatggcgtaaaccagggaggcggagcttgcagtgagccgagatcgcgccactgcactccagcctgggggatagagcgagactccgtctcaaaaaaagaaaaaaaggaaactagggccccagaataatcagctggttggtgagaagcctctgtttgaaccttttaacttccaatcccatatccttttatatgacagtatatttatctgagatatactgaaatgagtcacttttattatgagtcttctgatgaggcctgtgttttaaaagtctgggatctgtgaagatttcccatgtgcagaatctcctggcattaccatttggtgtgttaatttttaaacatggtaaacagagataataagggcaaaagattccttggaaagatgcaggtctgggaagccagtaggggatgctgagcgctcttttgactgactggatgcttcctttctcgccttttgaggtggtgtggaccctgcaagatcctggggccgaggttagagaagatggtggccaagcagcacgggaaggtggtgatggccaaggtggatattgatgaccacacagacctcgccattgagtatgaggtatggattgacagggagttgccacagggcagccagtataggaggtgtcaggcccagggatagctggtgtaggaggtatcttggggagcacaggtagccagtaagcaaggtgtcttggtttttccagagctttttttttttgagacggaatctctcactgtcacctgggctagagtgcaatggcatgatctcggctcattgcaacctctgcctcccgggttcacgcgattctcctgcctcagcctcccaagtagctgggactacaggcgcacaccaccacgcccagctaattttttgtatttttagtagagacagggtatcaccatgttggccagactggtctggaactcctgaccttatgatccacccaccttggcctcccaaagtgctgggattacaggcatgagccactgcgcccagccggtttttcgagagcttttaagagctcagagcactttgcagaggtggctcttgatcctctgagccacctgtctctcttcaccacctttaggaagtagatcgtatgacccaaaaacaccaggtcattcacttagtctcagacattggtacattcctttatccatctacccacatgttcagtgagcagtcatttgggagctcgatgtgccaagcatttgtgattctgacacaagatgagatcttgtctccaagcaagatctctcctagtctagcaggagagaacagcaggtagaaagatcatctcaatatagaagtgctaaaagaagaggcgcataaaggaagaagggactgtttgcttgtgggggagctggaggggacagggaatgcttcacgttagagagaacctctgagctgagccatgagggatgcgcagaggaggaggaagggctgaggaaacagcgtgcacaaagacatggagtcgtctcacttggttggttggtttgtctgtttattcagcagatatttgagagtccctcaagtgccaggtagtgttacttggtgttgaggataaggcagtgaacaaaactgacaaaatctctgcctccgtggagtctacattctagtattttaaatcaagggtcagcaaactttttctctaaaggactggttggtattggaagcattgcagggcagtggtcgctgctacaaccattcagctgggctcgtagccgaaagcagccatagacactatacaaacaaatgggcatggctgtgttacaataaaactttatttacaaaaacaagcagtaggctgtattgggcctgtgaactatagtttgctgacccctgttttagataataagttcaatggagaaaaatacatcaggaagagaggatgggagtactgcgtatgaggcagggtttttgttttttcgagacagagttttgctcttgttgcccaagctggagtgcagtggcacaatctcggctcactgcaacctctgcctcccgggttcaagcagttctcctgtcccagcctccggagtagctgagattacaggcacgcgccaccacgcccggctaattttttgtatttttagtagaaatgaggtttcaccatgttagccaggctggtcttgatctcctgacctcgggtgacccacctgccttggcctcccaaagtgctgggattacaggcgtaagccaccgcgcccagcgggtttcttttttaaagggtgggatagggtagatctccctgataagctgacctttgggcaaaaacaggaagggagtgactgaagcatgtgggtctttggaagaacaattcaggcaaagcaaaagccctgaggtctgatgagcctgggttgcttacagaccagcaggggccaggtgcctggaggtgtctgggttgggggcttcctctgggccttggagaccactacctggagaaaggggagaggcccactttgtctgggtggccagagtgaagggccgagtacggagctggggaaagcataatgcagccggattgggagggtctctgaatagccatgctgaaggtagcgctgttacagagccgagggcgctcctggcagcctctgggcccaacctggctcacagacacttttagtctggcactcgaagtattttaaagtaataggaagcagatgctgatatttgaaactcagatttcatgtgaaaatctcgatatctgattttcttgaaatatcttaacctggccggagtgagccttcacccctccctccttcctcctccaggtaacaagtgaatgaaagaggccgctttattcctcagagtatacaagtccaggtttcactcttactagaccagctcaaatagaggcacccatccctgaaccagtctcctgcggcaagaaatgggtggttgggagcggggtgagaacaggctggccgccccttgagctacgcagggagtggggagtgattacccaaaggaacatcagtctgcaatgaccagaagcaggggagatggagaccaggcagacaaacgcggtggccactacaggtgaccactggagcaggcctgctttgggagttaggaactgagggctgtttacaggggctgggggaggggtgagtcactttttcaaaaagtttggccactgattgctcagtgagggaggcatctatctgcccatttggatgcccctggctttcccctgcctggctatgcctcgggtgagagcccgggctggggctcctagggcctcccacaggtcacgcgtgggcttcagatgtctcaggcctcctggctctgccagacactacagcttcagcttcagccaatgtattcataactcttcagcagacaccccctgagggccagccatgtgcagggactatggtaactactgcagatgcaaagaagcccacaggccctgctccagtgtctcgtggggtggcgggaatgccgaggaccgtccccgggaggctgttgtgggagtgggcactgaaggcctgcggtgaagcctgggaagtgagaaggagatgcctcctgtggaatcctctcaatctccccccacacccaccgctcccgccctgtccactgcctggggactgtgctgtcacacagaaaggcctcaaggctgctaggcccacatcacttggtctcagccgtgttgtttagccaaaccctggtctgacatcattgcagggtttaggaagctccagccagggttcttcctgaccccctccctctctccctcccttccttctttccttccttcctcttttctttctgaagagagcctgaggaagaagtttcctctgagagaactacagtgccccccatgatggctttctttaaggcctaaaatcctttttcttttttgagatggagtctcgctctgtcgcccaggctggagtgcaatggcacgatctcggttcactgcaacctccgcttctcaggttcaagcgattctcctgcctcagcctcccgagtagctgggattacaggtgcccacgaccacgcccagctaatttttgtagttttaatagagacaaggttttaccatgtttgccaggctggtctcaaactcctgacatcaggtgatcagcccgcctcggcctcccaaagtgctaggattgcgggcgtgagccactacacctggcctaatttttgtatttttagtagagatggggtttcaccatgttgaccagattggtctcaaactcctcacctcaagtgattcgcccacctcggcctcccagagtgctggcattacaggcatgagccaccgcgcccggccaccaagactgcatttctaacaagctcccaggtgatgccagggctgggtgtcctgagccaacatggagagaagccaatgttctgaaggccccatactgactttttcattctgaaggccccagattgactttctggttctgaaggccccggactgactttctgtggggaggaactgctctttggaaggccgtgtctcagctgccgctctcagcacagactgcttgccagtgagaaagttcatggacaaatgtataatggcatgtgtccaccattccagcgccatacagaaccgttccaccgccctcggttcccctgttttccagcagttcacctctccttcctgcccctcacccccttaaccccccagcagtcactgatctcattttttgttgttgttctttttgaggattttatgtttttagggcagttttaggttcgtggcaaaattgagaggaaggggaaggtacagagacttcccataagtcccctgtcctcccgcatgcccagcctcccacactatcaacagcccataccagggtggtccatttgtcacaacttatgaacctacacggacatcattatcccccaaagccaaaagtttacataggggatcactcttggtgttgtgcctgctgtgggtttggacaaatgtgtcatagccggtgtccacattctagcatcatccagagtcatttcactgcctccatgtcctctctcctctgcctgttcatctctccttcctcctccctccaggcctggcgactcttgatcttttcactgtctacctaattctgccagaatgttatgtagttgattttttcaataatcgtttttccaagaaccctctcatatctaaaagcttttacaaagcacttggcattttgcatttgaagcatgaaatcctttaatgcgtccccacgttcttccccctgctgggactcagtagatgtctctctctctttgctgctgggcagaagcacaacagagtttgatcccctggactgcaaagtcaaacagatcttgtttcagatcccagcttttttttttttctttttttagagggggtctcgctcttttcacccaggtggagtgaagtggcgcaatctcggctcactgcgacctccatctcccgcgttcaagcacttctcctgcctcagcctcccaaagtgctggaattacaggcgtgagccaccacgcccggcctaatttttgtatttttggtagagacaaggtttcaccacgttggccggccttgtctcgaattcctgacctcagatgattcaccttcctcagcctcccaaagtgctgggattacaggcaggagctgccgcgcctggcctacaccacatcattttggaacagttgctcaccctttgagcctcagtattctcatcgttaaaatgatcctgcccacagccaggagagtgtgagatagtgtatagaggtgtttatatcattcctgacacgaaaaagcacccagcatgtgacagcgatcttttccttttaactctgcaatgagccgaggaggaggttgcaacatcccgcagcacccagcactgtgcctttcccttggtaggcccttagctgagttaacagatggatgccatcggggtgggacaggagaagacataccaggacacggagctcagtggcggtgcaggcgagctacgggttagcagaaagagactgcgcacacgtacacactcccccactcctgccgagttcagagggtctttatccaaggataggaggttccaagtggcttcacggaacaggacaggcaacacgtcgtagcgtatcttttcctcagcccctcagttggctcagtcactgcctctttcacactcaaaacattccagaagaatgtgccaaggccctgtgcacttccatgtaaggcagtgtttacaggcaccggcacctcctgatgtgtgagccagacacaggagcagcagagcttcagccgcctcctcagggtcaagggaagtcccattccagctcaggtttcctgtgagcccctagtgcgggtagtgtgtatgtgtgtgtgtgtatatatgtgtgtatgcgtgtgtgtgtttaagctcaacttcaaaatatccccttgatcagtagtgaccagacctccatcgacagcacatctgctgtctacctgacaccagcagggtctgtgcgtgttcaagcatgtgtggaggtttacatgagtgagatcattatggccttcatctggagttcttttttttttttttttttaatatttttatggagacgacgtcttgctatgttgcccaggctggtcatgaattcctgacctcaagcagtcctcctgccttggcctcccaaagtactttggattacaggtgtgagccactgtccttgtgcctatctggagttcttaaggaacgctaagtccactctctgagcctcttcagtgaacttagagtcttgccgtgaaaaaagttaggccacttatacagtggcataaagcatatattttaattaaaggaataggacagtgtgcaggtgggagccggtggctgagctctctgcttctgccaagaggctccggctttgaggcactccagctgcctttgcagaccactagagggcaccaaagaatgcctgggaaggccctggtggcttcaggcgcttcctggagcaaactctttcgggccctgctctgcctggagacagggtttgccacccacatcagcccagggacagcctttgaaggggcctgaggcactaacaaggacaaggactgtgtcctgtgacctgctgtgtttgtccccaaagtgtccgtgaggagtggggtgcagggcctgccacgtaaagttagtgggtgagggcgggatggtctggcctgcgtgcctttcctaactaccatgtgcatggtttttgaacattctgaatcttactggcttccaagatgggccgtggcagggcagcactgggatatgtgaagacctggtatgtttgtgtgaatctctgctcttactttgtagtttaatttgtatgtaagaaaagtctgtgtttatcttgttctgtttatttttatttatttattttgagggggggaacagagtcttgctctgtcgcccaggctggaatgcaatggcacaatctcagctcagtgcaacctctgcctcccgggttcaagcgattctcctgcctcagcctcccgagtagctgggactataggcatgccccaccacgcccggctaatttttgtatttttagtagagacggggtttcaccatgttggtcaggctggtctcgaactcctgacctcaagtgatctgcccgctttggcttcccaaaatgctaggattacaggcgtgagccacagcgaccggcctatcttgttctgtttaaatggttttctcaaatgcccacgaatgccaggcagggatcccaggcagcagagacctcacaatgccagtctggtgggccacagcctcatccacgttccacataacctatgcaggtccctgagggaactgagtaaatgcttcacagaccaagaatgttgtccttgccatctgcctgcaacctgctaataagcgtcaggttgtgtatggccaagcctctcctctcatgctgtccagtagaagtccctgagtttctggaccctgtcactcatcacagcagcaagctaatgtgctctcgtggggcctgtgttggacttttccttgtgccctctgtagccactgttttttgaatgcccacagtatgccaggcacaatgccaggttcctaagcttatttgccgggcgctgtgctgagcctttacttgcgttatttcattcagctttcatgccctctaatggcagtgcccttagtatctccatcctgcatctgagaacactgaggcttagtgactgaggggcgtgccccagctcacctggctggtaggagccggattgcgtccgccagaacctgagctctgctttatttatgtatttatttatttatttatttatttatttatgagatggagtctcactctgtcacccaggctggagtgcagtggtgcaatctccactgactccagcctccacctcccaggttcaagcaattctctcacctcagcctcccaagtaggtgggattacaggtgcctgccaccatgcccgactaatttttgtattttcagtagagacagggtttcaccatgttggccaggctggtctcgaactcctgacctcaaatgatctgcccacctcagcctcccaaaatgctgggattacaggtgtgagccaccgcgcccagcctgagctctgctttatactcaaatctttctctttttttttgaggcagggtctctgtcacccaggctggagtgcagtggcacaatcacagctcactgaagcctcagtctcccaggctcaagcgatcctcctgcctcagcctcccgagtatgggagtacaggcatgtaccaccatgcctggctaatattttgggggggtttagtaaacaaagggtctcactatattgcccaagctggtctggaactcttgaactcaagcaatcctccagcctcagtctcccagaaggctgggattatagatataagccactgtgcccagcctatacttgaatctttaatgttcatcccaaaccctaaaggtagacattacccccattttatggaaaaggacactgaggctcagaaaggtgctgtgacccggccaaggcccccttgctagtgagtgcaaagccaggactcgaactgtcccccagcttctgtctcctcctgggccaggcttcccctgagctcctccctgcccccagccctggcctgcagctgcaagggttattttcatctctcctgtcattccagcaaaaccactgggccagtgagtcagtcttgtggttaagggaggaagggtactgttgggagcccgcaatggaagacgtttcttcagcgggtggcccccgggccctgcagtacccctgcaccgagagaagagccatgttcctctaggcctgcccatggctttgggaagtcagtgccctggataagccaccagccttccccacaaaggctcaggagtggcagttgagaagtattcactcccaattcacttggacccccttgtcctctccacccaggtgtcagcggtgcccactgtgctggccatgaagaatggggacgtggtggacaagtttgtgggcatcaaggatgaggatcagttggaggccttcctgaagaagctgattggctgacaagcagggatgagtcctggttcccttgcccgcgtgggaccccaatagaactcagcccttccatgccagcccttcctgctgcctccctcctgtctggctcctggggcccatgcttagagcccaggctccagccctgagtgcttccgagctggcggactgcccaggggccatcagaggatggtggtgctgctgctgatccggggaccgctgtcttccctcccatacgcctttcatccctccttctagggcctatggcagttctcccaggatgtgtggcgagagcctgggccagcccacagcgttcctagtcaggcagccacaccttggtcctcatcttggtcccttccaatctgaaacctcgtgcctggctcgtctgccacctacatttctctttccagctgctgttttgtaaaaagaaaaagaaaaaagaagcccaaactagtgagagtaatatctaattatctcattttttgtaggtctgtgataaagaacttagtcatcccttccacctcctactgtgaagaacagaccctgggtcccacactgaaatcccctctagtcacccattcccaccccccagggagctgcctcccaggcagggggtgcagaaaatgattgatgggctggggaaccctggagagcctcgactccggaagtctcaaggtgcctcctcctctccttagctggcccgttggttttctgagcagggggctgaactgtgaacaagtcagacaaataaagcaagggtctgcaccatctgcaatgtca

SEQ ID NO: 146 - DNA, 1349 bp, Homo sapiens
cccgaggaagtgacgacaggcgtgcccttgacaggcagggagggctaggctgtgcatccctccgctcgcattgcagggagatggctcagcgacttcttctgaggaggttcctggcctctgtcatctccaggaagccctctcagggtcagtggccacccctcacttccagagccctgcagaccccacaatgcagtcctggtggcctgactgtaacacccaacccagcccggacaatatacaccacgaggatctccttgacaacctttaatatccaggatggacctgactttcaagaccgagtggtcaacagtgagacaccagtggttgtggatttccacgcacagtggtgtggaccctgcaagatcctggggccgaggttagagaagatggtggccaagcagcacgggaaggtggtgatggccaaggtggatattgatgaccacacagacctcgccattgagtatgaggtgtcagcggtgcccactgtgctggccatgaagaatggggacgtggtggacaagtttgtgggcatcaaggatgaggatcagttggaggccttcctgaagaagctgattggctgacaagcagggatgagtcctggttcccttgcccgcgtgggaccccaatagaactcagcccttccatgccagcccttcctgctgcctccctcctgtctggctcctggggcccatgcttagagcccaggctccagccctgagtgcttccgagctggcggactgcccaggggccatcagaggatggtggtgctgctgctgatccggggaccgctgtcttccctcccatacgcctttcatccctccttctagggcctatggcagttctcccaggatgtgtggcgagagcctgggccagcccacagcgttcctagtcaggcagccacaccttggtcctcatcttggtcccttccaatctgaaacctcgtgcctggctcgtctgccacctacatttctctttccagctgctgttttgtaaaaagaaaaagaaaaaagaagcccaaactagtgagagtaatatctaattatctcattttttgtaggtctgtgataaagaacttagtcatcccttccacctcctactgtgaagaacagaccctgggtcccacactgaaatcccctctagtcacccattcccaccccccagggagctgcctcccaggcagggggtgcagaaaatgattgatgggctggggaaccctggagagcctcgactccggaagtctcaaggtgcctcctcctctccttagctggcccgttggttttctgagcagggggctgaactgtgaacaagtcagacaaataaagcaagggtctgcaccatctgcaatgtca

SEQ ID NO: 147 - protein, 166 aa, Homo sapiens
MAQRLLLRRFLASVISRKPSQGQWPPLTSRALQTPQCSPGGLTVTPNPARTIYTTRISLTTFNIQDGPDFQDRVVNSETPVVVDFHAQWCGPCKILGPRLEKMVAKQHGKVVMAKVDIDDHTDLAIEYEVSAVPTVLAMKNGDVVDKFVGIKDEDQLEAFLKKLIG

SEQ ID NO: 148 - DNA, 2461 bp, Homo sapiens
tgcagcgtgccgttcctccctctggctgttccagtgcgtgctgttcaccggctcctggagcaccgccaccacagcgtcacctggcccgccactgagctccccatcacacagctgaccagctccatcgtgcggcgcgtgaatgaggcttctgggctctaccagatgttcggtgtgctggccgatgtcatcctgttgaaggaaacaggaggtgaggttccgccctgcacactggcccctgcctcggcccacggccatccatcacatcgtggaagacttcttaacagactggactgccccgatcgggcacatcctacctctgaggcgcttcctggagaactgtttggacaccgatttgcgaagcttctatgcagagtcctgcttcctgttcgccctcacgcgccagaagttgccacccttttgccagcaggggtacctgaggatgcagggactcgtgagtaccgagagcctttggcagcacagagtggagagcaggctcctgcgggactatgcccccacaggcaggcgcctggaggacagcagccagcagcttggcgaccaagagccactaggttcccccctggctccagggcctctggctcagtccgtcgatagcaacaaagaggagctctgactgtcccttcctaagctgtgggcacagtggccaggcctccccacctaggcccatggtcagtccctctttccccgcaacctcacactcccgccaatgcgtgattgccaaagaccactcagatcatggcagtgtctgcagcaaagccaccagatggcacgtgagggctgaaagtcggggatgcggtggtctcctccctcctgtcagggggcagaagggcatcctctgccaggtgggagctgccttccccagcccagtttgtctgcaatggagctgtcgctgagccccaggccagcccagttctgccccgtctcaagtgctcctcttccttccaagcccctcctcagatgggcctgcatcccgcctgtggagtgcttcacaggggaaacccatccgcatcttaagagtttgtggcaagcgctttaaaacaaaagctctgatatcctcaacaaccacaacgggcaggtgggattgttgccccagatgactgctgaagacaccagctgtgggatgtcaagtaattccagggacccccagctgggagtccccgtctgtgtcacttgccacacactgcctcaacctccccgccccattttcagcagggtttgggcttagctacagagcccaagagggtcagccctgcttatcatcataggcccagcaggctgatctcgagcagcgataggacagctccctgcaaagccatcttagcaactttctcactgagaagcaggattcagagctgctctccccagttgcaccccctgactcatcttccagctggctcttctctcccatcctactcccttctgtctccctgccctctgccatcctgaaccatgccttgcttctaacctgcctggtcaagttttgtgaaacttatcctgctgtctcgggctggcacccatatgtgctcaccatgtgtaaggtgacatttccaaatgcctttgtgtgataatgatgatgaatttggttcctagtctcttcttcattgcccttcctcaccagcaatctgcactttcccatcaggcgtcttagtctcatttgtaagtgcataagataatcacagtgatttttcaaagcccaggatcataagtgattgctttttcactggttcttactaactcttcatgtatccactcaggtgatccacctgtcttggcctcctaaagtgttgggattacaggcatgagccaccacgctcggcccagtccagactttttaactacctggccccactgcagacacagttccctctagtccttcccagagttacaagaagagaactccagtagccttattctgtcagggacgaattgtttaccccatgataatgtaggatatcataaattcttcttcaaaggttttagcctgtaatttgttaagtacattgagttctgagatcctctccaaagaaccaatgtatcagtatgttcagctcacctgttctttgttcttcattttaacttttaatttcctcattctttatgtctccttgcccctagtttcagtaaacaatcccctcctagcctctgtcacctgctctgacctgagtcacctttagtcacctggtccgtaaccatctttcctgtctaaacttctcaccccaccactctggcttatacccctgctctctttaaaatagccagtcagaattagcttagattgtgcggtccaaccctagcccataggggaacaacacagcagtagggggtacctgcatcagggataagaacccattcccctcccttgttccggtgtgctctcgccattgcaccatccatgagacgcactcttgtatagaagtaaaattgccttgctgagaaaatgtat

SEQ ID NO: 149 - protein, 149 aa, Homo sapiens
MFGVLADVILLKETGGEVPPCTLAPASAHGHPSHRGRLLNRLDCPDRAHPTSEALPGELFGHRFAKLLCRVLLPVRPHAPEVATLLPAGVPEDAGTREYREPLAAQSGEQAPAGLCPHRQAPGGQQPAAWRPRATRFPPGSRASGSVRR

SEQ ID NO: 150 - DNA, 3786 bp, Homo sapiens
gcgcggcctcattagaccacgggttgcagccggagcggctgggaggatgggcctctccgctgcggccccgttgtggggtcccccggggctgctcctggccatcgccctgcacccagcgctgtcggtgcccccgcgccgggactactgcgtgctgggcgctgggcccgcgggcctgcagatggcctacttcctgcagcgcgctggacgcgactacgcagtgttcgagcgggccccgcggcccggcagcttcttcacacgctacccgcggcaccgcaagctcatcagcatcaacaagcggtacacgggcaaggctaacgccgagttcaacctccgccacgactggaactctctgctcagccacgacccccggctgctcttcagacactactcgcgtgcctacttccccgacgcccgcgacatggtgcgctacctgggtgacttcgcggacacgctggggctccgtgtccagtacaacaccaccatcgcccacgtcactctggacaaggaccgacaggcctggaatggccactacttcatcctaactgaccagaagggccaggtgcatcagtgcagcgtcctctttgtagccactggtttatcagtccccaaccaggttgacttccctggctccgaatatgcagagggttacgagtccgtgtccgtggaccctgaggactttgtaggccagaatgtgctgatcctgggtcgtgggaactcggcctttgagacagcagagaacatcttgggtgtcacaaactttatccatatgctcagccgctcccgggtccgtctgtcctgggccacccactacgttggagacctcagagccatcaacaatggcctgctggatacctaccagctcaagtccctggacgggctgctcgagtctgacctgacggatctggccatcctgaaggacagcaaaggcaagttccatgtcaccccgaaattcttcctggaagaagccagcaccaaccagagtgccgactccatcaccctcccccaggacgacaatgacaactttgccatgcgcgtgccctatgaccgggtaatccgctgcctgggctggaactttgacttctccattttcaataagtccctcagacttaactcgggaaatgcattcggcaagaagtacccgctgattcgagctagctacgaatccaaaggaagccggggtctgtttatcctgggtactgccagccactcggtggactaccggaaatctgctgggggcttcatccacggattccgatacacagtgcgtgctgttcaccggctcctggagcaccgccaccacagcgtcacctggcccgccactgagctccccatcacacagctgaccagctccatcgtgcggcgcgtgaatgaggcttctgggctctaccagatgttcggtgtgctggccgatgtcatcctgttgaaggagaattccacggcctttgagtacctggaggagttccccatacagatgctggcccagctggagacactcacagggaggaaggcaaagcacgggctcttcgtcatcaacatggaatatggcagaaatttctctggccccgacaaggacgtcttctttgatgaccggtctgtggggcacacagaagatgcctggcagtctaactttcttcatcctgtcatctactactatagatacctccccaccgaacaggaggtgaggttccgccctgcacactggcccctgcctcggcccacggccatccatcacatcgtggaagacttcttaacagactggactgccccgatcgggcacatcctacctctgaggcgcttcctggagaactgtttggacaccgatttgcgaagcttctatgcagagtcctgcttcctgttcgccctcacgcgccagaagttgccacccttttgccagcaggggtacctgaggatgcagggactcgtgagtaccgagagcctttggcagcacagagtggagagcaggctcctgcgggactatgcccccacaggcaggcgcctggaggacagcagccagcagcttggcgaccaagagccactaggttcccccctggctccagggcctctggctcagtccgtcgatagcaacaaagaggagctctgactgtcccttcctaagctgtgggcacagtggccaggcctccccacctaggcccatggtcagtccctctttccccgcaacctcacactcccgccaatgcgtgattgccaaagaccactcagatcatggcagtgtctgcagcaaagccaccagatggcacgtgagggctgaaagtcggggatgcggtggtctcctccctcctgtcagggggcagaagggcatcctctgccaggtgggagctgccttccccagcccagtttgtctgcaatggagctgtcgctgagccccaggccagcccagttctgccccgtctcaagtgctcctcttccttccaagcccctcctcagatgggcctgcatcccgcctgtggagtgcttcacaggggaaacccatccgcatcttaagagtttgtggcaagcgctttaaaacaaaagctctgatatcctcaacaaccacaacgggcaggtgggattgttgccccagatgactgctgaagacaccagctgtgggatgtcaagtaattccagggacccccagctgggagtccccgtctgtgtcacttgccacacactgcctcaacctccccgccccattttcagcagggtttgggcttagctacagagcccaagagggtcagccctgcttatcatcataggcccagcaggctgatctcgagcagcgataggacagctccctgcaaagccatcttagcaactttctcactgagaagcaggattcagagctgctctccccagttgcaccccctgactcatcttccagctggctcttctctcccatcctactcccttctgtctccctgccctctgccatcctgaaccatgccttgcttctaacctgcctggtcaagttttgtgaaacttatcctgctgtctcgggctggcacccatatgtgctcaccatgtgtaaggtgacatttccaaatgcctttgtgtgataatgatgatgaatttggttcctagtctcttcttcattgcccttcctcaccagcaatctgcactttcccatcaggcgtcttagtctcatttgtaagtgcataagataatcacagtgatttttcaaagcccaggatcataagtgattgctttttcactggttcttactaactcttcatgtatccactcagaattccaaggacaatcccagcactctgggaggcccaggcaggtggatcacctgaggtcaggagtttgagaccagcctgaccaacatggagaaaccctatctctactaaaaatacaaaactagccaggcgtggtagcacatgtctataatcccagctactggagaggctgaggcaggagaatcacttaaacccgggaggcagaggttgcagtgagccgagattgcgccattgcactccagcctaggtaacaagagggaaactccatctcaaaaaataagttaattaaattaaattaaaataaaacatgcgctgggtacagttgcttacacctgtaatcccagcactttgggaggccaaagtgggccgatcacctgagctcaggaattcgagaccagcctggccaacatagcaaaaccttgtctctactaacggtaaaaaaaattagctgggcatggtggagcatgcctgtcatcccagctacttgggaagctgaggcaggagaattgcttgaacctgggaggtggaggttgcagtgagcagagac

SEQ ID NO: 151 - protein, 682 aa, Homo sapiens
MGLSAAAPLWGPPGLLLAIALHPALSVPPRRDYCVLGAGPAGLQMAYFLQRAGRDYAVFERAPRPGSFFTRYPRHRKLISINKRYTGKANAEFNLRHDWNSLLSHDPRLLFRHYSRAYFPDARDMVRYLGDFADTLGLRVQYNTTIAHVTLDKDRQAWNGHYFILTDQKGQVHQCSVLFVATGLSVPNQVDFPGSEYAEGYESVSVDPEDFVGQNVLILGRGNSAFETAENILGVTNFIHMLSRSRVRLSWATHYVGDLRAINNGLLDTYQLKSLDGLLESDLTDLAILKDSKGKFHVTPKFFLEEASTNQSADSITLPQDDNDNFAMRVPYDRVIRCLGWNFDFSIFNKSLRLNSGNAFGKKYPLIRASYESKGSRGLFILGTASHSVDYRKSAGGFIHGFRYTVRAVHRLLEHRHHSVTWPATELPITQLTSSIVRRVNEASGQMFGVLADVILLKENSTAFEYLEEFPIQMLAQLETLTGRKAKHGLFVINMEYGRNFSGPDKDVFFDDRSVGHTEDAWQSNFLHPVIYYYRYLPTEQEVRFRPAHWPLPRPTAIHHIVEDFLTDWTAPIGHILPLRRFLENCLDTDLRSFYAESCFLFALTRQKLPPFCQQGYLRMQGLVSTESLWQHRVESRLLRDYAPTGRRLEDSSQQLGDQEPLGSPLAPGPLAQSVDSNKEEL

SEQ ID NO: 152 - DNA, 3362 bp, Homo sapiens
gggttcggtcggaggcggggaggccggagctgcgggcgtagggacctggcggctcctgaagcgcacgcgggcgggcggcaggtgtgcgcggcatccctgtcacgtggccgaagagcctggggcgcgcggaccctggcagggggcggggcgcacgcaggccacacccacttcaggctcccacccggtcgctggagaggggccaaggcctctggaaggtccaacctggagggtggttcaaaggggtgttgggcaccctcaaattaggggaaaattggggagtacgctctccttccccagggtggaggttactacaatcataagcggggagccggtgcccctgaggaaggagaccctgagggagataagatggaggggctcgggattccggggagccccaagtcccagcttgaaacggtggagtccgggcaaatgagctctgaggacggcttctgggcctggccgtgacccagattgcagtgagagttcccgcaggccccgcctctttctgggcctcgtgtctcccagccgccgggccgggtgcgaggccttacccctctgatctgctgcaggatgggcctctccgctgcggccccgttgtggggtcccccggggctgctcctggccatcgccctgcacccagcgctgtcggtgcccccgcgccgggactactgcgtgctgggcgctgggcccgcgggcctgcagatggcctacttcctgcagcgcgctggacgcgactacgcagtgttcgagcgggccccgcggcccggcagcttcttcacacgctacccgcggcaccgcaagctcatcagcatcaacaagcggtacacgggcaaggctaacgccgagttcaacctccgccacgactggaactctctgctcagccacgacccccggctgctcttcagacactactcgcgtgcctacttccccgacgcccgcgacatggtgcgctacctgggtgacttcgcggacacgctggggctccgtgtccagtacaacaccaccatcgcccacgtcactctggacaaggaccgacaggcctggaatggccactacttcatcctaactgaccagaagggccaggtgcatcagtgcagcgtcctctttgtagccactggtttatcagtccccaaccaggttgacttccctggctccgaatatgcagagggttacgagtccgtgtccgtggaccctgaggactttgtaggccagaatgtgctgatcctgggtcgtgggaactcggcctttgagacagcagagaacatcttgggtgtcacaaactttatccatatgctcagccgctcccgggtccgtctgtcctgggccacccactacgttggagacctcaggtccctcagacttaactcgggaaatgcattcggcaagaagtacccgctgattcgagctagctacgaatccaaaggaagccggggtctgtttatcctgggtactgccagccactcggtggactaccggaaatctgctgggggcttcatccacggattccgatacacagtgcgtgctgttcaccggctcctggagcaccgccaccacagcgtcacctggcccgccactgagctccccatcacacagctgaccagctccatcgtgcggcgcgtgaatgaggcttctgggctctaccagatgttcggtgtgctggccgatgtcatcctgttgaaggagaattccacggcctttgagtacctggaggagttccccatacagatgctggcccagctggagacactcacagggaggaaggcaaagcacgggctcttcgtcatcaacatggaatatggcagaaatttctctggccccgacaaggacgtcttctttgatgaccggtctgtggggcacacagaagatgcctggcagtctaactttcttcatcctgtcatctactactatagatacctccccaccgaacaggaggtgaggttccgccctgcacactggcccctgcctcggcccacggccatccatcacatcgtggaagacttcttaacagactggactgccccgatcgggcacatcctacctctgaggcgcttcctggagaactgtttggacaccgatttgcgaagcttctatgcagagtcctgcttcctgttcgccctcacgcgccagaagttgccacccttttgccagcaggggtacctgaggatgcagggactcatggctcagcgacttcttctgaggaggttcctggcctctgtcatctccaggaagccctctcagggtcagtggccacccctcacttccagagccctgcagaccccacaatgcagtcctggtggcctgactgtaacacccaacccagcccggacaatatacaccacgaggatctccttgacaacctttaatatccaggatggacctgactttcaagaccgagtggtcaacagtgagacaccagtggttgtggatttccacgcacagtggtgtggaccctgcaagatcctggggccgaggttagagaagatggtggccaagcagcacgggaaggtggtgatggccaaggtggatattgatgaccacacagacctcgccattgagtatgaggtgtcagcggtgcccactgtgctggccatgaagaatggggacgtggtggacaagtttgtgggcatcaaggatgaggatcagttggaggccttcctgaagaagctgattggctgacaagcagggatgagtcctggttcccttgcccgcgtgggaccccaatagaactcagcccttccatgccagcccttcctgctgcctccctcctgtctggctcctggggcccatgcttagagcccaggctccagccctgagtgcttccgagctggcggactgcccaggggccatcagaggatggtggtgctgctgctgatccggggaccgctgtcttccctcccatacgcctttcatccctccttctagggcctatggcagttctcccaggatgtgtggcgagagcctgggccagcccacagcgttcctagtcaggcagccacaccttggtcctcatcttggtcccaaagaaaaagaaaaaagaagcccaaactagtgagagtaatatctaattatctcattttttgtaggtctgtgataaagaacttagtcatcccttccacctcctactgtgaagaacagaccctgggtcccacactgaaatcccctctagtcacccattcccaccccccagggagctgcctcccaggcagggggtgcagaaaatgattgatgggctggggaaccctggagagcctcgactccggaagtctcaaggtgcctcctcctctccttagctggcccgttggttttctgagcagggggctgaactgtgaacaagtcagacaaataaagcaagggtctgcacc

SEQ ID NO: 153 - protein, 699 aa, Homo sapiens
MGLSAAAPLWGPPGLLLAIALHPALSVPPRRDYCVLGAGPAGLQMAYFLQRAGRDYAVFERAPRPGSFFTRYPRHRKLISINKRYTGKANAEFNLRHDWNSLLSHDPRLLFRHYSRAYFPDARDMVRYLGDFADTLGLRVQYNTTIAHVTLDKDRQAWNGHYFILTDQKGQVHQCSVLFVATGLSVPNQVDFPGSEYAEGYESVSVDPEDFVGQNVLILGRGNSAFETAENILGVTNFIHMLSRSRVRLSWATHYVGDLRSLRLNSGNAFGKKYPLIRASYESKGSRGLFILGTASHSVDYRKSAGGFIHGFRYTVRAVHRLLEHRHHSVTWPATELPITQLTSSIVRRVNEASGQMFGVLADVILLKENSTAFEYLEEFPIQMLAQLETLTGRKAKHGLFVINMEYGRNFSGPDKDVFFDDRSVGHTEDAWQSNFLHPVIYYYRYLPTEQEVRFRPAHWPLPRPTAIHHIVEDFLTDWTAPIGHILPLRRFLENCLDTDLRSFYAESCFLFALTRQKLPPFCQQGYLRMQGLMAQRLLLRRFLASVISRKPSQGQWPPLTSRALQTPQCSPGGLTVTPNPARTIYTTRISLTTFNIQDGPDFQDRVVNSETPVVVDFHAQWCGPCKILGPRLEKMVAKQHGKVVMAKVDIDDHTDLAIEYEVSAVPTVLAMKNGDVVDKFVGIKDEDQLEAFLKKLIG

SEQ ID NO: 154 - DNA, 4455 bp, Homo sapiens
gggttcggtcggaggcggggaggccggagctgcgggcgtagggacctggcggctcctgaagcgcacgcgggcgggcggcaggtgtgcgcggcatccctgtcacgtggccgaagagcctggggcgcgcggaccctggcagggggcggggcgcacgcaggccacacccacttcaggctcccacccggtcgctggagaggggccaaggcctctggaaggtccaacctggagggtggttcaaaggggtgttgggcaccctcaaattaggggaaaattggggagtacgctctccttccccagggtggaggttactacaatcataagcggggagccggtgcccctgaggaaggagaccctgagggagataagatggaggggctcgggattccggggagccccaagtcccagcttgaaacggtggagtccgggcaaatgagctctgaggacggcttctgggcctggccgtgacccagattgcagtgagagttcccgcaggccccgcctctttctgggcctcgtgtctcccagccgccgggccgggtgcgaggccttacccctctgatctgctgcaggatgggcctctccgctgcggccccgttgtggggtcccccggggctgctcctggccatcgccctgcacccagcgctgtcggtgcccccgcgccgggactactgcgtgctgggcgctgggcccgcgggcctgcagatggcctacttcctgcagcgcgctggacgcgactacgcagtgttcgagcgggccccgcggcccggcagcttcttcacacgctacccgcggcaccgcaagctcatcagcatcaacaagcggtacacgggcaaggctaacgccgagttcaacctccgccacgactggaactctctgctcagccacgacccccggctgctcttcagacactactcgcgtgcctacttccccgacgcccgcgacatggtgcgctacctgggtgacttcgcggacacgctggggctccgtgtccagtacaacaccaccatcgcccacgtcactctggacaaggaccgacaggcctggaatggccactacttcatcctaactgaccagaagggccaggtgcatcagtgcagcgtcctctttgtagccactggtttatcagtccccaaccaggttgacttccctggctccgaatatgcagagggttacgagtccgtgtccgtggaccctgaggactttgtaggccagaatgtgctgatcctgggtcgtgggaactcggcctttgagacagcagagaacatcttgggtgtcacaaactttatccatatgctcagccgctcccgggtccgtctgtcctgggccacccactacgttggagacctcagagccatcaacaatggcctgctggatacctaccagctcaagtccctggacgggctgctcgagtctgacctgacggatctggccatcctgaaggacagcaaaggcaagttccatgtcaccccgaaattcttcctggaagaagccagcaccaaccagagtgccgactccatcaccctcccccaggacgacaatgacaactttgccatgcgcgtgccctatgaccgggtaatccgctgcctgggctggaactttgacttctccattttcaataagtccctcagacttaactcgggaaatgcattcggcaagaagtacccgctgattcgagctagctacgaatccaaaggaagccggggtctgtttatcctgggtactgccagccactcggtggactaccggaaatctgctgggggcttcatccacggattccgatacacagtgcgtgctgttcaccggctcctggagcaccgccaccacagcgtcacctggcccgccactgagctccccatcacacagctgaccagctccatcgtgcggcgcgtgaatgaggcttctgggctctaccagatgttcggtgtgctggccgatgtcatcctgttgaaggagaattccacggcctttgagtacctggaggagttccccatacagatgctggcccagctggagacactcacagggaggaaggcaaagcacgggctcttcgtcatcaacatggaatatggcagaaatttctctggccccgacaaggacgtcttctttgatgaccggtctgtggggcacacagaagatgcctggcagtctaactttcttcatcctgtcatctactactatagatacctccccaccgaacaggaggtgaggttccgccctgcacactggcccctgcctcggcccacggccatccatcacatcgtggaagacttcttaacagactggactgccccgatcgggcacatcctacctctgaggcgcttcctggagaactgtttggacaccgatttgcgaagcttctatgcagagtcctgcttcctgttcgccctcacgcgccagaagttgccacccttttgccagcaggggtacctgaggatgcagggactcgtgagtaccgagagcctttggcagcacagagtggagagcaggctcctgcgggactatgcccccacaggcaggcgcctggaggacagcagccagcagcttggcgaccaagagccactaggttcccccctggctccagggcctctggctcagtccgtcgatagcaacaaagaggagctctgactgtcccttcctaagctgtgggcacagtggccaggcctccccacctaggcccatggtcagtccctctttccccgcaacctcacactcccgccaatgcgtgattgccaaagaccactcagatcatggcagtgtctgcagcaaagccaccagatggcacgtgagggctgaaagtcggggatgcggtggtctcctccctcctgtcagggggcagaagggcatcctctgccaggtgggagctgccttccccagcccagtttgtctgcaatggagctgtcgctgagccccaggccagcccagttctgccccgtctcaagtgctcctcttccttccaagcccctcctcagatgggcctgcatcccgcctgtggagtgcttcacaggggaaacccatccgcatcttaagagtttgtggcaagcgctttaaaacaaaagctctgatatcctcaacaaccacaacgggcaggtgggattgttgccccagatgactgctgaagacaccagctgtgggatgtcaagtaattccagggacccccagctgggagtccccgtctgtgtcacttgccacacactgcctcaacctccccgccccattttcagcagggtttgggcttagctacagagcccaagagggtcagccctgcttatcatcataggcccagcaggctgatctcgagcagcgataggacagctccctgcaaagccatcttagcaactttctcactgagaagcaggattcagagctgctctccccagttgcaccccctgactcatcttccagctggctcttctctcccatcctactcccttctgtctccctgccctctgccatcctgaaccatgccttgcttctaacctgcctggtcaagttttgtgaaacttatcctgctgtctcgggctggcacccatatgtgctcaccatgtgtaaggtgacatttccaaatgcctttgtgtgataatgatgatgaatttggttcctagtctcttcttcattgcccttcctcaccagcaatctgcactttcccatcaggcgtcttagtctcatttgtaagtgcataagataatcacagtgatttttcaaagcccaggatcataagtgattgctttttcactggttcttactaactcttcatgtatccactcaggtgatccacctgtcttggcctcctaaagtgttgggattacaggcatgagccaccacgctcggcccagtccagactttttaactacctggccccactgcagacacagttccctctagtccttcccagagttacaagaagagaactccagtagccttattctgtcagggacgaattgtttaccccatgataatgtaggatatcataaattcttcttcaaaggttttagcctgtaatttgttaagtacattgagttctgagatcctctccaaagaaccaatgtatcagtatgttcagctcacctgttctttgttcttcattttaacttttaatttcctcattctttatgtctccttgcccctagtttcagtaaacaatcccctcctagcctctgtcacctgctctgacctgagtcacctttagtcacctggtccgtaaccatctttcctgtctaaacttctcaccccaccactctggcttatacccctgctctctttaaaatagccagtcagaattagcttagattgtgcggtccaaccctagcccataggggaacaacacagcagtagggggtacctgcatcagggataagaacccattcccctcccttgttccggtgtgctctcgccattgcaccatccatgagacgcactcttgtatagaagtaaaattgccttgctgagaaaatgtat

SEQ ID NO: 155 - protein, 682 aa, Homo sapiens; identical to SEQ ID NO: 151

SEQ ID NO: 156 - DNA, 4310 bp, Homo sapiens
gggttcggtcggaggcggggaggccggagctgcgggcgtagggacctggcggctcctgaagcgcacgcgggcgggcggcaggtgtgcgcggcatccctgtcacgtggccgaagagcctggggcgcgcggaccctggcagggggcggggcgcacgcaggccacacccacttcaggctcccacccggtcgctggagaggggccaaggcctctggaaggtccaacctggagggtggttcaaaggggtgttgggcaccctcaaattaggggaaaattggggagtacgctctccttccccagggtggaggttactacaatcataagcggggagccggtgcccctgaggaaggagaccctgagggagataagatggaggggctcgggattccggggagccccaagtcccagcttgaaacggtggagtccgggcaaatgagctctgaggacggcttctgggcctggccgtgacccagattgcagtgagagttcccgcaggccccgcctctttctgggcctcgtgtctcccagccgccgggccgggtgcgaggccttacccctctgatctgctgcaggatgggcctctccgctgcggccccgttgtggggtcccccggggctgctcctggccatcgccctgcacccagcgctgtcggtgcccccgcgccgggactactgcgtgctgggcgctgggcccgcgggcctgcagatggcctacttcctgcagcgcgctggacgcgactacgcagtgttcgagcgggccccgcggcccggcagcttcttcacacgctacccgcggcaccgcaagctcatcagcatcaacaagcggtacacgggcaaggctaacgccgagttcaacctccgccacgactggaactctctgctcagccacgacccccggctgctcttcagacactactcgcgtgcctacttccccgacgcccgcgacatggtgcgctacctgggtgacttcgcggacacgctggggctccgtgtccagtacaacaccaccatcgcccacgtcactctggacaaggaccgacaggcctggaatggccactacttcatcctaactgaccagaagggccaggtgcatcagtgcagcgtcctctttgtagccactggtttatcagtccccaaccaggttgacttccctggctccgaatatgcagagggttacgagtccgtgtccgtggaccctgaggactttgtaggccagaatgtgctgatcctgggtcgtgggaactcggcctttgagacagcagagaacatcttgggtgtcacaaactttatccatatgctcagccgctcccgggtccgtctgtcctgggccacccactacgttggagacctcagagccatcaacaatggcctgctggatacctaccagctcaagtccctggacgggctgctcgagtctgacctgacggatctggccatcctgaaggacagcaaaggcaagttccatgtcaccccgaaattcttcctggaagaagccagcaccaaccagagtgccgactccatcaccctcccccaggacgacaatgacaactttgccatgcgcgtgccctatgaccgggtaatccgctgcctgggctggaactttgacttctccattttcaataagtccctcagacttaactcgggaaatgcattcggcaagaagtacccgctgattcgagctagctacgaatccaaaggaagccggggtctgtttatcctgggtactgccagccactcggtggactaccggaaatctgctgggggcttcatccacggattccgatacacagtgcgtgctgttcaccggctcctggagcaccgccaccacagcgtcacctggcccgccactgagctccccatcacacagctgaccagctccatcgtgcggcgcgtgaatgaggcttctgggctctaccagatgttcggtgtgctggccgatgtcatcctgttgaaggagaattccacggcctttgagtacctggaggagttccccatacagatgctggcccagctggagacactcacagggaggaaggcaaagcacgggctcttcgtcatcaacatggaatatggcagaaatttctctggccccgacaaggacgtcttctttgatgaccggtctgtggggcacacagaagatgcctggcagtctaactttcttcatcctgtcatctactactatagatacctccccaccgaacaggaggtgaggttccgccctgcacactggcccctgcctcggcccacggccatccatcacatcgtggaagacttcttaacagactggactgccccgatcgggcacatcctacctctgaggcgcttcctggagaactgtttggacaccgatttgcgaagcttctatgcagagtcctgcttcctgttcgccctcacgcgccagaagttgccacccttttgccagcaggggtacctgaggatgcagggactcgtgagtaccgagagcctttggcagcacagagtggagagcaggctcctgcgggactatgcccccacaggcaggcgcctggaggacagcagccagcagcttggcgaccaagagccactaggttcccccctggctccagggcctctggctcagtccgtcgatagcaacaaagaggagctctgactgtcccttcctaagctgtgggcacagtggccaggcctccccacctaggcccatggtcagtccctctttccccgcaacctcacactcccgccaatgcgtgattgccaaagaccactcagatcatggcagtgtctgcagcaaagccaccagatggcacgtgagggctgaaagtcggggatgcggtggtctcctccctcctgtcagggggcagaagggcatcctctgccaggtgggagctgccttccccagcccagtttgtctgcaatggagctgtcgctgagccccaggccagcccagttctgccccgtctcaagtgctcctcttccttccaagcccctcctcagatgggcctgcatcccgcctgtggagtgcttcacaggggaaacccatccgcatcttaagagtttgtggcaagcgctttaaaacaaaagctctgatatcctcaacaaccacaacgggcaggtgggattgttgccccagatgactgctgaagacaccagctgtgggatgtcaagtaattccagggacccccagctgggagtccccgtctgtgtcacttgccacacactgcctcaacctccccgccccattttcagcagggtttgggcttagctacagagcccaagagggtcagccctgcttatcatcataggcccagcaggctgatctcgagcagcgataggacagctccctgcaaagccatcttagcaactttctcactgagaagcaggattcagagctgctctccccagttgcaccccctgactcatcttccagctggctcttctctcccatcctactcccttctgtctccctgccctctgccatcctgaaccatgccttgcttctaacctgcctggtcaagttttgtgaaacttatcctgctgtctcgggctggcacccatatgtgctcaccatgtgtaaggtgacatttccaaatgcctttgtgtgataatgatgatgaatttggttcctagtctcttcttcattgcccttcctcaccagcaatctgcactttcccatcaggcgtcttagtctcatttgtaagtgcataagataatcacagtgatttttcaaagcccaggatcataagtgattgctttttcactggttcttactaactcttcatgtatccactcagaattccaaggacaatcccagcactctgggaggcccaggcaggtggatcacctgaggtcaggagtttgagaccagcctgaccaacatggagaaaccctatctctactaaaaatacaaaactagccaggcgtggtagcacatgtctataatcccagctactggagaggctgaggcaggagaatcacttaaacccgggaggcagaggttgcagtgagccgagattgcgccattgcactccagcctaggtaacaagagggaaactccatctcaaaaaataagttaattaaattaaattaaaataaaacatgcgctgggtacagttgcttacacctgtaatcccagcactttgggaggccaaagtgggccgatcacctgagctcaggaattcgagaccagcctggccaacatagcaaaaccttgtctctactaacggtaaaaaaaattagctgggcatggtggagcatgcctgtcatcccagctacttgggaagctgaggcaggagaattgcttgaacctgggaggtggaggttgcagtgagcagagac

SEQ ID NO: 157 - protein, 682 aa, Homo sapiens; identical to SEQ ID NO: 151

SEQ ID NO: 158 - DNA, 1225 bp, Homo sapiens
cccgaggaagtgacgacaggcgtgcccttgacaggcagggagggctaggctgtgcatccctccgctcgcattgcagggagatggctcagcgacttcttctgaggaggttcctggcctctgtcatctccaggaagccctctcagggtcagtggccacccctcacttccagagccctgcagaccccacaatgcagtcctggtggcctgactgtaacacccaacccagcccggacaatatacaccacgaggatctccttgacaacctttaatatccaggatggacctgactttcaagaccgagtggtcaacagtgagacaccagtggttgtggatttccacgcacagtgtcagcggtgcccactgtgctggccatgaagaatggggacgtggtggacaagtttgtgggcatcaaggatgaggatcagttggaggccttcctgaagaagctgattggctgacaagcagggatgagtcctggttcccttgcccgcgtgggaccccaatagaactcagcccttccatgccagcccttcctgctgcctccctcctgtctggctcctggggcccatgcttagagcccaggctccagccctgagtgcttccgagctggcggactgcccaggggccatcagaggatggtggtgctgctgctgatccggggaccgctgtcttccctcccatacgcctttcatccctccttctagggcctatggcagttctcccaggatgtgtggcgagagcctgggccagcccacagcgttcctagtcaggcagccacaccttggtcctcatcttggtcccttccaatctgaaacctcgtgcctggctcgtctgccacctacatttctctttccagctgctgttttgtaaaaagaaaaagaaaaaagaagcccaaactagtgagagtaatatctaattatctcattttttgtaggtctgtgataaagaacttagtcatcccttccacctcctactgtgaagaacagaccctgggtcccacactgaaatcccctctagtcacccattcccaccccccagggagctgcctcccaggcagggggtgcagaaaatgattgatgggctggggaaccctggagagcctcgactccggaagtctcaaggtgcctcctcctctccttagctggcccgttggttttctgagcagggggctgaactgtgaacaagtcagacaaataaagcaagggtctgcaccatctgcaatgtca

SEQ ID NO: 159 - protein, 97 aa, Homo sapiens
MAQRLLLRRFLASVISRKPSQGQWPPLTSRALQTPQCSPGGLTVTPNPARTIYTTRISLTTFNIQDGPDFQDRVVNSETPVVVDFHAQCQRCPLCWP

SEQ ID NO: 160 - DNA, 66194 bp, Mus musculus
  misc_feature (1)...(66194): n = A,T,C or G
aggaggtgagtgtctctggtcgcctcctcctctccccctttttcgcccccgcctccttgtggcgatgagaaggaggaggacagcgccgaggaggaagaagctgatggcggcggcggagctccgagagacctcggctgggcaggggctcgccgtggcgggctggggactgcgtctgtagagctgtgagttcccgagaattcgctgcagcggacgtgctcgtgggatcagtgttgctgtaccctcctcccggcctggtttaggcccggcccctcgcacttgcccctaccatttctgttgagtccgcatccctctccggccaccgcaaccaggcgaagagaaaaaggaacttccccccacccctgttgggtggcggcggagctccggagcccacccttaggagcggggcggggaccccgtttcggagaagagatttcctcaggattctcgtttttttcctcggttgtatctccgaaagaattaaaaatggccgagaatgtggtggaacccgggccgccttcagccaagcggcctaaactctcatctccggccctctcggcgtccgccagcgatggcacaggttagtctcgggactcccggccttccatagttcccttcgtcttttctgctcgttgcaccttcattccagggtgcttctgtgtatctcttcccatttccccggccggtgtttaattttaaaggtttttgaatggactggtcgaagacgtccagtagcccaaccattttctttgccttctgatacattcattgcaacactatgtcatgtcagatcgttgtgtgttctggaattaagaggttggaagtgggagctgcggggacctttattgttggctccatgcaatttaatttgggaaatgccggtacaatcgtgtgtgagggcttttatgcacttttactatttttgttactggtgaatgagggatttcagctctttctcccctgttgcaatgaattctttttttctctgctttcccacctttaatgatttttgctcctgtgaggcagattttctgttgaggaatgggggcggaagacaaatcttggtgtctgcgatccaaggttttaagtgtaactaaagttcaacaaaatttcattcttaggtcccctctccccatccttgcctcaagagtcagtatggaccgcagtttattttatatccatttgccatgaaaccaaaatgtctcaaactgcgtgttgaggtgtagacctgaggcgtttcctttgcagtttgtcacactcttacttagaagggaaagaaaaaagatgaagcctttctggaattaggtacttagaaatgggagataataagttgaaagactcccagtcatgaacttccaactaaagtgattgtacaagtttaaaaatgaacaggaggttttgtgcttgcatgtttgttttgttttgctttttggacctttgcaattccagtttacaagatgaaggaattcttttctccagtcagcccctttgttaggagacctgaagggagactctcccttgtctgttctttttcctgcttactgttagtttagtgttattctgatgatcactgacctggtcctctcttgctgtctgacttgtttgagaggccaggataatgaagaagaagaagaagaaaaagaagaagaagaagaagaatggctagtcatctgacagtccactagatgttcctccttactgcaagcatccctttaactcagagaagaggctccagatctctccttctgccaatgagagtgtatagtggagttaaacgtaccctgcaagttgtagagaatgtgtgggccatgtttctgagtaggatttctattaaggcctggaaataagatagaactagtgcattactctgcttttttagcagctgtatttcgaaccatgagttttgctcacctgcaacagttgggaaggataagtcttgcagtgttctaaggctctaactttagttatatgtgagcattcagctgtaaagtttccgtagtcttagagaattttttttaaattatgtctttgaaattcataggcatagatattttatagacatatttgctctggatttttgtttcctcctctgcccccataataagtgtacttctgtaacatgttcacaagttaccatatttgacatagccagtaacaagaaatattatggaaaactttttaaaattaaatttttggatgttctgattttgagtgacttagtcataaagtctgttcatgtaattctgttcagatggactactgcattctttatctgataaattgtatagcttttggctaactttcatggttaaaaaagggaaaacttgctttgggtatctttgaatgtcattactggagtctttgggtggtagtggtggggctggggttttctttgtgtgggtctagatgtcctggaattcacatcaccagcctctacctcccaagtgctggatttaaaggcaggtgccaccaggaccaccaacttctagagtcttaaaaaatttcaatactgagattggtttattcttagtagtaaggattatagtaatattagtaatttttcttctcttaacattgtagtgacggttaaattttttttcttttaaaatttatataccattaggtcggttttattttgttttgagacagggtttttgtagctctgactatcctagaactctccatgttgataagactgcccttaagctcacagagccacctgcttctgcctcctgtttgctggggttaaaggcctgtgtctcaaggacctgcttgtttcttttccttttttttttttttttttttttttaatttgatacagggtatcactacatagccctgactggcctacaatctagagagaaatgattgactctgcctcccttcctcatggtgggattaaaggtgtgtgccaccaagcccaacaggtatataatttaaattataccagcctagttttctagttttttgtcagggttgggcgaatgaatttaccatgtgggtgccattacgtacattttggtagttctttggatccagaaacgtgatagtaatacatttttaggcaacttgtaaggaagcattttacatttaaaacttacagtgtcaagccgggcagtggtggtgcatgcctttaatcccagcatttgggaggcagaggcaggcggatttctgagttcaaggccagcctggtctacagagtgcgttccaggacagccaggactacacagagaaaccctgtctcgaaaaacaaaacaaaaagaaaacaaaaaaataacttacagtgtctttattttgatcttttcccttcccccccagggttgtaaccttggttgtcctggaactcatgtggactcataataaaatctatctgcctctgcctgcagtgttgggattaaagatcattgattaaagacttgcattttgattttttaagatgttcattgggtggtttataaacatgaaagttggttgttgtgcctgattttatctagagctggccaaaattctaaaaaattttttttaaatgcacattggtgttttgcctctgtgtgtgtatacatacatacatatatatatatgaatgacagtgttgcatctcctgtgactgttgtctgttgttacaggctggggtaaactcccatgtgggtcctgggaattgaacccatgtcctctggaagaacagccagtgtatttattgctgaaccatctctccagctggactctacaaactttttaaaaagtacattaggcttataaaatgtgtggtgtatatatacctatcaaatatttgaatgtattttttttataagaaagcaactaagtctgtgagttggtaagctctgaggtatcacaaaacagatgagtatttaacccaacttgtgaactccccaccccttttttcttattttctttttggggttttcaagacaaagtttttctatgtaacagccagcttgactgtcttggaacttcaaatgtagaccaagctggtcttgtgctcatagagagctgtctgcttctgcctcccaagtacttgggattgaaggtgtgagccaccaagccctgtcagcttttggatttaggtggcaatgcagaattaagaggaccccaggtacattatgaaattgccaggttaagtccagtgacttgatttaggttcacattttctgttgaaatgggaaacaataaaagcctgccttcccttttcccttccttctttcctctctgtctgtctttgtttttgtacttcagtgtttgcatttcagtatttttttttcttttttttgagtctcatgtagctctagcagtcctagaactcaacatgaagaccattctcaaagattgtttctgcctcttaattgtcctgctgaaacttaactttcttctattctttctcccctagaagaccataaaagctatttgtaaacttttttatatatatataaaaaattgttcacagaagttaataggtaagtttttgaatacttgttgaactgattatatctgctgatcttaaatgatggcagtcatgagtgtgatctttttccttcattgctcagtgaacattttgtcactgcttggaaatcacttaaagaactcttaagaggctgtgtaaagatgggtaacagttttaggacttagcacacaattcagtagagtatacatttccttctctagcccttctgtgtggataactgaactggcttggatttatgtcccaaaccaatctctctatcccagtttcaaagacactaaggaaacagtgtatgaagtctactttgaattttgaccactaggttagtgtatactagtttatactagagaactggtaaagagtgtatactagtgtatactagagaactggtaaagattgtgtactagtgtatactagagaactggtaaagagtgtatactagagtatactagagaactggtaaagagtgtatactagggtatactagagaactggtaaagattgtgtactagtgtatactagagaactggtaaagattgtgtactagtgtatactagagaactggtaaagagtgtatactagagtatactagagaactggtaaagagtgtatactagagtatactagagaactggtaaagagtgtatactagtgtatactagagaactggtaaagattgttttgctacagcttttttgcccctgcctccccagtgagggattacaggggcaagccacacaattttttaaaaatatgttttatttttcttaagataacactgtataaagtaaatgacttaccatcctactcagaattcgtctatggagttgtgttttgtttttgctcagatcttggcattatgctttaatttttttgttttgtttttattttagttgcaaaatgtgtatgttagagttgctttaaaatctgataggttgaacagccaacctcatggtttagggaggtgttgctgtgctgactgatgaaatacagcagaacgctttgccccacaccttaaatttctcaaagccttataaattcagtgaaaggccctcaagtagattgtctggttgacagtgacagagtatgggttcttttccccatcaggagctagtgttgagtgaattgatggtggagaaggagaagagggctaatgtcctttggcatttagtttctaccccctcttgaagaaaataatttgaaacacttaaagatgaatgcagagtggtgttcgtagacatgctaaatattgcgtcataagtgggagtataaagtaatatattgtggtaaattaaaaaaaacctcagatgtcattttttccagtttataatatccaacaattaatcaatgagaaataggaagtagttttcattttcattttttggttttcattcagtttccttttttttttttttactttaaagatggggtcttactgtgttgcctaggtggtctgaaaactcttacggtataaccaaccttccagttaagcctctgtagtagctaggactacaggcatgctgcattatacctgcttgaagctattgtaagtgtgagaaactttagttaaacagtttataccaaagattaagataaatcaaacatttaattttgtgcttattttggccacacatagactaagattgaaataatacagagaagattagcatggttcctgtataaggatgtcacaaaagtgagttgggcatggtcatttttgtacacctataattccaacagtcaagatgcgatggcaagaggattgagtgtttgagctcagccttagctataatgtaacaaggccctacctacctcaaaacaaaaatgaagaaatcaaaatatagtgatttttttttttttggcaaataactattttttcacatgatggctagtaagtagtttctttctgaaattttgattaattttttttgttgctcatttcttgaaaagagtataagatggggctgttaagatggcgagtgggtaaaaatacttgcttgtgcagtcctgtacattcgagttcaacctgtagaacctaaataaaaagtaaaaaggagagccaatctacaaatttgtcctgaccaccacatgcatgctgtgatgagcatgtacgtacagacacaatggacagctaagagtatagatacttattagttaagcctcttagcaatttggtttgttagtttttttcacttttttatttttacttattttgcatattagtattttgcttgtatgtgtatgccatgagtgtacctggtgctttcagatcagaagagggtgtggatccccgagactggagctgtcttacgtgtgcttggaactgaacccaggttgtctgtaagagcagtacatgctcttaaccattgtgccatttctctagctccacatataaaatttgttcttagataacacagtcttttagatacctcaaagaacaatccaagttttattgagaagataattttaaagctagcatggtctgtctacatagcaggttctaggtcacccaaggatacgtagtgagagccaatctcaaaaaacaaaacaaaacaaacccctactgaacaataaagctgagtggtgacagagaatgggctttggagtcagacttggacaactgagaatcccctgcctttattaactgaaccaacttacagttcctcttccttacctgtcgtgcccactgttacaggactgtggtaaggaataagtgggaatgttctgtacagtgcttaggaaaactgcagtcctaaaactctaggaggatgagattaattatttctagttagagtctaccctgggctacaaagtgatactactacataaatgaccctgagacaaaagaaatctaaagctcgggacagcacttgatattgtgcaatgtgtacacacatgaaatgtgaagaagttactgccaactccaccacaggacattagtggtagacttttattttatggaaatacagataaggataaagacgaaggaaagaagtgcagagaggtagtgatcaagtaagtcttgtagcagacttttattatcacccacctaaagattaagtctgccagtgctataagaataagggagcagagaggcaaacctaagaataaagcactcttaccatggtgtacctataatcccagcctttgggagttgggagcatgaaactgcaagtttttaggctggactggattagagtaagggttttttctaaaaaaatcaaccaaagcaatgtatgtacttgctaccacacagtgttttgtatctaaataatttaaaactagttggtatttattagcagtatgagaaacagaatcaaattgttcttgttttttgcttttttcgagacagggtttctctgtattcgatcctttggaactagagttacagatagttatggggtaccatgtgggtgccggaaattgaaccctagcggtaacaagtactgactgctgagccatctcttcagttactgtttttgttgttttgagacaaagtctcattctgggctggaactcactgtaatagcacagtagctcagactcctttgaaatcttttttttttttttttttttgatttttcgagacagggtttctctgtgtcgtcctggctgccttggaactcactctgtggaccaggctggcctcgaactcagaaatccgcctgcctctgcctcccaagtgctgggattaaaggccaccaccgcctggcttgaaatcttttgagatgcttctacttgtcctggtgtcctgaggtagaatcactgtgcctgtccaaaagatacttctttttattttttgagacaggatttctctttatgttacccttgccttgctgctgtagaacgcactctatagaccaggctggcctaagaacttaagagatctgcttacttctgcttcctgagtagtccaccaccccccagccaaaagttactttcctataaagaggaagaaaaatgtagtgctttttagtttagttttatcacatcaagattatatacatacgtgaatgacagagtcttatgttatctcaggctaacttcaaactatgacaaccctacctgcttcctatgggtcagggtcacaggtctgagccatcaaaacctaccttaaggattaagaactacatttaaatgtagagccagaaaccttagtcagggtgtaaaacttattgtatgtgtatgtgtgtgtttgtatgttggtgtatgtgtgtggaccagtgcgtgattttttttttattggctatcttctgtaatcacacttgacctaatttgtttgagatgaggtcccactgaatctgaagctcattgtttaggctgtataggctgggcagcaaggctcagggaaccttctctatctacttgcccaggattggaaataggtgccactacctggcttttacatgggtgctaggggctccctcaggtctttatgcttgagtagcaagcactttgttaacagaagccatcttccaactctactgatgaatgagcggtatttcctcccttctgccttagtgtccttcaggtatttagttttggtttttcaaagcactaattgcaacaccctagacgagtttcatggcctattgttagcttgtgaaccacaatttaaagagtattagaacaaagagttttaacaatggcagtagctttttggtctaatgttttttatatacttatatgctggacatttatgctttcttggtttatgaaaactccatgttcaaacagacatgtttttgtttttccttcccagaatttgcagatacaggtactgacactggaaaagtctggtgtgaccagcatttatttgggaagtatagttaggaacagataggtgaatatgaagtctagcttctgtaatcacacttcagactggtgcgtgtctgtgaggagtttgtgtctggttgtggaatctcataacacctatgatgtaccttggctgaaatagaggagtgtgtgaggctagaaagtgtggtcattccattaacctataaatcccacttgcctggatagtaagaagttagagatgatggaggggttaaacatgtgtggctaacaatgcttacagaagtttaaattgcatattttagctgtttaaatggatgtagaattatacttaagatattaaaatgaggtaagacctgggaagaggcagtaagggaagagaattttaaagatttctggctttagtaaaggtggtctttctcacagaagatagaaaaaaagtggtaaggtttgaaagttaggtggctgagatattataactgggtattgattccagtataagtagccaggtggagaaatctgattattttcaagtttcaagttggggaaaatgggtgggcaatttaacttaccaagggattataggaagagaagtgtgtgtgtgggggtatatgtatgtgttgtatgaacagatggaggatcaaatgtatatactagggaagtgactcaaaccttggacatactgtcttcatttgatgcctgttcctttggaactagcagttgctgaatatttaccgaagattagacatttagaataatataaagaagatcaaccaaggtcgtttctgctaaggtggtatacacagacacacacagtttccttacaaacagtgcactggtagtctttaaaggtatctgataggggccagtcggtggtggcacctgcctttaattctagcactgggaggcagaagcaggtgaatttctgtgagttggaggccagtctagtctacagattgagttccagaacagccaggcctacacaaacctataggcctgattgaacactgccgccaccccccccccaaagatagctgatagagatatttcagatttcagacataggtcttagatattgctggaaaaattcatatagcaaaaggtgcatgttaacaaaagtgattagagctgaaagtacttagcttttgttagacatggggaagggtatttcacataaatacaaacgatgtgcctagaatgtatgctgtgtgtttggatgttttcattgagacagaaatggataagacaaacatggtaaggaatttatttgccattattgggttttctcaacaaaaactctaggagtaagaaaatggttggtgaagactcttgtgatggccgagtatccagagtaagttgcagggagaggacctgagagcagaatagctgttctaagactcctttgtagaccaacctggtctagaactcaagacatctgcctgagtgctgagtagattaaaggccaccattgcctgaccagaggctttttatttattttattgagtgtacatttggtgtgtgggttagagaactttgtggagttgtttccattacttttatctgtattctaggatttgaattcaggtggtcaggcttttggagcaagttttctttacctactgagccatctatttttctggcaactcgagattttaagaataaatgattggctactttctctgtttatcctcttctataggtattccttctcaacaaactctgaagtttattgataaagtcaagacatcatacagtgatagcatggtttgggtttaatgtgaatatagcattcacttgatttaccaaaaaccctatttttgtttgtgtaagtgggtgcacctgtgtgcacatatgtgtgtgcttgtagagaccagtagaatgtgtaaaatctcttctagctagacttacaggcagttgtgaactgacaattttgatgctgggaactgaactcagttctattgcaacagcagcaagtgctcgtaaccactgagcctgttgctagcccgttccgctgatttttattttttacatgtgagcgttgacctgcacatgtctgtgtgaaccatgtatgcatgtaagttctttgaatagaactgggtcttctgcaagagcaagaagtgctttcatcctttgcgctgtcactcccactcaactgagctcttatttatttatttatttatttaaaccgtaaggttttactatgtagccctggctgatctggagcatcctgtgtagaccagaccactctcaaattggaagagatctgcctacttgctatttcacttatttttcttttgtgtgtataggcattttacccctatgcatgtctgtgtgcagtgccagaagagggtattggatcctctgaaactttaattacagatgattttgagccaccatgttggtgacataatttaaattggtttttctttaagaacagccattgcttttaacttctgggcaatttattaatttgttttgttttgttgagagaggatctctctgtcctggctggccttggactcacagaaatctatctacctctgcctcctaagagctgggattaaatgcctgtgccatgcactaacatataagtagaaggcctaaactggaattgtgcaagagcagtgtgtattctctgctgcagagctatctagcactccccctcaaaactagggtttttggggacgggggtgggggaatccacacatcctgtgttttaaacattgaccactaacaactgagctttatttccagaccttagttttttctccacatgttatttgtgtgtgccaggactggacaacttttgtgaatctgagttgtctctctttccaccatgatggtagggggatcagctcattatcaaacttgacaggatttgcctgctttattactagctgagccatcttagtggactactcctgcgatttttattactatgtttattttgtgacttttctctataatttgtgacatgtataagaataagtagttgaaggttatcttagtttcttcactatattcagtatgatgataatagactattttctattattatattccagtggaaagtaaaaaaaaatacttaaagtaatctcaattatgtaaatatcaaggatgtaatgaaaaaagtataatattaggcaatttttgaatggtagctttcagtcactttcatttaaaatttatgttccaaattatccgtggattttatttatttatttatttatttgttattaaatctaagtacactgtagctgtcttcagacacaccagaagaggtcgtcagatctcattacagatggttgtgagccaccatgtggttgctgggatttgaactcaggaccttcggaagagcagtcggtgctcttaaccactctgccatctctccagccctcatggattttttaattaaattttttgtttgttttttgttttcattatttgtatatttgtgtttgtctttgtatacatgaatgtgttgcttttggaggccagtagaagatactaagtcccctggaactggagttacaaatggttctgagcctcatgaattggggagcttgcatcctctgcaatagttgtgcagactgtcctctgagcatgttttatttcttacatgtttatggtagaagggtcggtcaggttctttaaaagaagaaatgaaacgaatgcttcccctgcccggcattaatgcttttttttttttttttttttttttttttttttttttttttggggttttcgagacagggtttctctgtatatccctggctgatcctggaactcactctgtaaaccaggctggccttgaactcaaaaatccgcctgcctctgcctcccgagtgctgggatttaaaggcgtgcgccaccaagcccagctcattagtgcttttttcttggaaactatttgaaaaccttaaaaggagagaaaactcaaacacttaagcattaaaacaagtcagtaagatggtgatgtttgtttaatatagtctagaatgaccttgaactccttatctggtctccatttctcaagtgctggcattataggagtatgctgtaactatgggctaaaagaatactggcgccaatattaagccaaaatctgtaatatgtctacaattcttggttgaggtagagagtggctgtttgcaattaaatagtacccagaggcataacactttctggctagattttggttaaggcaaacttttgtgatatgtaaccaaatccacttcactattaaaggctgtacttgtgatatgagaagtgatcagctgtggtagacagttggttctgtactactgcatccagacttgtgttggttgtatatgtattatagtacttagttttcattttaacttactttctaaggaacactggaactgcccaatttaatttcaaaagttggaggattttgttttgagacaagatttccctctgtaagcctgttctgtcctcagctccggagtgctagggctctaggcgtgagccatcatgctgaatttagattagcatttaaacagaaattattaaagcataggaaagaagtctcagtggttacaagcatctcctacctttccacaggtctaagttcagttttcagtacccaagttaggcagctcacaactacttctaattcacaactacttctaattccatcttcagggaagatgctcttttctgatctccgttggcacacacataaacactaagaagtaacaattgaaaacaaaaatcttaaattaatttgtctgtgtacacgtctttgtgagttatccctgtgagtgtgaaagtcaaaggacagcttataggaatctgttctcttctttatccatgagggttcttggccatgaactccagttgtcaggcttagctgcaagcgcaattctctagagtcatcactgacccagcatgccttctaacaattattaatactaaggtttcagcaattcatttagtaggtattgtgccaacattcagtcctcttaacttggtgttatgcctcggttcttaggttttgggtcgggttttgttttttgtttttgtttgttttttgttgttttggtttggtttttctttttttttctttttcttttttttgttttgttttgttttgtttttcgagacagggtttctctgtatagccctggctgtcctggaactcactttgtagaccaggctggcctcgaacttagaaatccaccttgcctctgcctcctgaatgctgggattaaaggcgtgtgccaccacacccggcttggtttttcaagatagggtttctctatataacaagccctggctgtcctatactctttttgtagaccaggctggcctcaaactcactgaaatctgcctgcctctgctttctgggtcctgggattaaaggcatgtgccaccatatgtggctagttcttaagttttatagcttgtttggctagccaaaattagccttttaggaaagaatacaatactattttagtatattaaaaaaacttcaataaaataaacatttagttttctttggagagttgtaagatgtaattattttatgcttaccgagaactaaattgtcttaagagcttctgattttggttgtgtcacatttaacctttatcttttctatttgtttttagattttggttcactgtttgacctggaacatgacttaccagatgaattaatcaactctacagaattgggactaaccaatggtggcgatatcagtcagcttcagacaagtcttggcatagtacaagatgcagcctcgaaacataaacagctgtcagaactgctgaggtctggtagctccccaaacctcaacatgggagtcggtggcccaggccaagcgatggccagccaggcccaacagaacagccctggattaagtttgataaatagcatggtcaaaagcccaatggcacagacaggcttgacttctccaaacatggggattggcagtagtggaccaaatcagggtcctactcagtccccagcaggtatgatgaacagtccagtgaaccagcctgccatgggaatgaacacagggatgaatgctggcatgaatcctggaatgttggctgcaggcaatggacaagggataatgcccaatcaagtcatgaacggttccattggagcaggccggggacggccaaacatgcagtacccaaatgcaggcatgggcaatgctggcagtttattgactgagccactacagcagggctctcctcagatgggaggacagccaggattgagaggcccccaaccacttaaggtaagtactgtttgtgtttgtaaccttttgtccattttagtgatcgagttcaaggttacttatttttgtatttatgtgccaaggatctaatgtgttggttcaagtcataagctcttttattaaatttataggaaatatttttatacttgactggtatcctgtaccttcatgattcttttgaaatggtaacctatggattcctaatctttctggtctctaacttttggaatctttttaactccttttagaatctacattatccttatagtctccttataaaagtacaattttaagataacgggtattaacactgtttaggcagagaattcatttgttctatttcattcagctcctttattcatgagggttctaggccatgaactcaggttaatcactgtccagtgtaaaacaaagatgctctgaccaaggaccaaggaccaaggcttacagcagcactagtatgtaggtttaaacaaaaacactaagaaggtacttgataccatattattaatttagttaggaaataactatgggctactacatgaatgagacatgactttcctcctgtggagcagacctgaaatccaatcaagaaacctgtggtttaccctcattatagtaaggatactatagcagccttgggaacatcttacctggaagcgttgttgtagcttgcatatgcatggtttggtaagaccaagtggctttacgccctagcagcctgctacattttacctcctagcacatgaaagctagtcagcagggaggaatcttcccgctccattccgtctctattctccatgttctgtaaccagtgtgtggtttcaaaagtactattctaccatctagatcaggtggacaattgaaacaatggcagtagtcgatattggtggcttctggggcatctccaactggcattgagatttttcatttagtaacctatggctttcggagcagcagtatgcataagcagacttatgcagaatacttctgtttaaatttttttttcctgacagagtgatggaacatctttaatcccaggacttgcaaggtagaggcaggtagatttcagtgaattccaaggcagccatgaatccaaaaaaaaaagggtgggcacacttgacacttgtcctccttaccattttactgttttaagaatagtgttttgtttttttgtttttttttttcattctgcttggactttaagctttaagatagtctcctggcttttacaggagttctctgtatcctaattcaggttatcaagcttgtatctcattaatttttttactcactgagctagctttcttgtccttgtattttttcattttttattgttatttgtatgtgatgtgtttgtggacatttcttttctactatggggatagaacacaacttagtgaagttctctctttccaccttaatgtaggttttggggattaaacagcattgtcttcaagtttaaataccaaaatcttttaccttatctaagccatcctgccagccctgaaattgtatttttgtgtttaaagattattttatttatatgagtacactgtagctgtcttcagatacaacagaagagggagtcagatcccattacaaatggttgtgagccaccatgtggttgctaggaattgaacttaggacctcttgaagatcagtcagtcttcttagccctcgagccatctctctagccctctaaaattgtatttttatttagctaacagaatagcaggtttctagatgggtttttcatatattcttagatttgactagccttttccccaactcccaaaacttttctatccacagtgttctttgttctaccatatcaaatgtattaagctctcttccctctaacacacataaacatcctaccatggtatctttgtgttgttctcacctctgcatgtgccctgaagttaaacttacaaatttaaatatttgaagctaagatctacatatgagagattgtgtggaatttatctttctgggcctgagttacctcatgctttcattttccttcaaatttaattttcagttacagctgaattccattgtgtatatgtataaatttttgtagaaatttgttagttgagggacatctcggctgctgctcttccctagctttttgtatagaacagctgtcaatgtggagataatgtggaacttacctaattatgtcagacaagtgttaaacagagagagagattcattgggaggaacctaagtcagtgtgttaaaaatttgttacttagctgggcagtggtgttgcatgcctttgatcccagcacttgggaggcagaggatttctgagttcgaggatacccagggctatgcagagaaaccctgtctcaaaaaaaccaaaaaaaaaaagttgttatttttaaattatgcattgtgtgtgtacatatgcattgtgtgtgtgttcatatgcagtacacatggaagctgcagaccagaagcacaggatttccccgtgtggctggtattacaggcagttgtgaacctcccgtcttgtcccaggacatctctccactctgtgctttcacagattatatcctgaatacatggcagtgagcaaaacattaattctaccttcatagagcttacatttcaatagggaaattcacaacttaagatgcttttgttgtttattttgttgttttttgagacagagtttctctgaacagccctggttgtcctggaactagctctgtagatgaggctggcctcaaactcaaagaaatttgcttgcctctgcttccagagtaccaggtttaaagatttgcacaaccatggggcaaaaaagataaatattaagctgagcatggtagcacacatttttgagtccagcacttgggagccagagccacatggatggatctctcaattaaaggccagccttgtctgccagagtttcaggatagccaaagctacatagtgagatactatctcaaaaaacaggaggatgatggtggggatggattttgctacatttaggatgtagctcagggttcagtgtagaaagtgtgcttagtatgaacaagaacctagggttgatcaccagttcccctaaaatatttctgagcttcattcaagtgagtatttactttaagagagtaaattccattccccaaatagtgataatataatttttagaattttctcttggcatcaatctgtgatacatttctgtatgtaatgttagagtttttttaattaaagacaggatctcactatcccaggctggccttcaacttcctgtgtaacactgatcttccttccattactttctgaatgctgagatttcatgcaagtaacccacactcagtttatggggtacagatggtcaaatccaggtcttcatgggtgtcaggcaagaattatattaactgagctctttatctccagcactaagagttctagatctgtaaagttttacattcagagtgtgtcgtagagatatgatggctcaacagttaaagaacttgtactgatcttacattggatctgaattttcaggatctatgatgattggtacccaaacccctgtaaatatagctccggggggggggggggtctaaggcctttgatctgctgggagactcatactcatttgccaccaagtctggctttgttttgttttgctatgtagcccacgttggtctcaaactcaagagctatcaaattcaggtctcttgtcctatccttctggatgctgatattaaagcttgtttttgtaatcatttatttaatatgtatgagtgttttactcacatgtatgtatgttcaccatgtacatgtatgcttagtgacaccaaatgccagagaaagattccctcagtctgggattatggaacgtatgttctaccatgtggattcttgggaaatgagtcatttgctaaaacaagtggtctgaactgcctgagccatctctttagcccaatatttgatttctaatgtgtccatatgtatcttattacaatcctagttttctgcagcagcagaaattaacaacagggtatttaatatgtgcaagactgcttttagcaaaggaagaatgatactttaaggcttttgtgggatagagggtgttttttgcttgttccttcctggttgttgtgtgacacaactttccctgaggagagacaacacacaatggctactacccaaatagggaatcacagactaaagcataaatatcaccagaatccaatttggtgcagcagtgagcgttattagggtgattaccagagtatgagttgaagagaagaaatgactcaaagacacctgcatcaccaaagcccacccagcacgggtaataaagctggaaacctagacattgccctgcaggcaactctacagcttgaagaaaatcctttccacgtgcctcagttggtctaaacttcttccaggcagcttggctactttctgctgctcctaagtagctggtctggccttagagtcctctttgaagcttttctcctctgagagaaaagctgtagctcagcttctgtataggggaaacagctttttgctgatttgggcagtgagggatctagtgaatctgatcagtttcaggaccttcctgaattgatttttaattgacagcttcctatataaaggaaggagctcccagcaggattgaatgtttcgatctaggatagcaacactggtcctttcttttccttttcaggttaggtcagtgtctgtattatggtgggtaattggacatcaggaattaccagctataaagggaagtgagatcaaataacatcattgtagcagacacaaatatagtcctatctttcttctgtttgttgggggagagaaaaaaggcttcaagtgacagaaagtataataatgggaaggtagatattctgagatacaataccagtttcagtttgtattgagatttatgtgaacacagacattataattatttatagacactgaggcagcttacaaatgtctacactttatttacttctgtgaagttttagaaacattgttatttgttcttgtgtcattcaaagttatgtggtaaattggctttcatactatgtctcaattttcattttcattaaggatacaattataaatataccataattcagtataggcatggatattattattattttagaataaatattgctactgtaaataagcaaaggtttagtagttaggagccctggttctcttcccctttcagaggacccaggtcctattctcagaatctatgttgtagccaaccctaacaccagttgcagggatctgatgccctctactgtccttgaaagccactgcatgttagtggtacacatacatccagacagaacactcacaaaataagcagtgtggttgtgcatgtttatgatccagctttgggaggctgagtagggggattgcacttccaagtcagccttgattacatagtgagattatatcttaaagagtgtacgtggtactacttaagaaaaacatttgcactattgtgatcctaatatttcctttactagttaatactaggtagtcacataagagtgggaatgtgactgccatggaactggtaattctgcttctccttcctaagtgctaggattgtaggcctcatagaaccaagcctggtaggaaaatgcagttggcgtgggggttaagaaaaattattccgtaaatgcttgccacacaagcacagggacttattagtcaaaagcacccaagaaaaaagccagctctggtggcatattaatcttaacaatggagaggcaaagaccaggctcctttgcttaatcagcaagatccaagtttagtgagagacttacttgtgagatgtcttggtagtaaagacaattgcccagacctagtatctttgactcagatagtcttctaacttctttatatgcactagggtaagtgcatgcaagtgtgtatgtatgggctctcatgaatgcaaaaacaaattcagtttaaaatatttaacattcttcattgtatagtgggatggctccagataaactgagcacaaagaagataatgcttttaaaagtttttttgtagtcatggctctatttaaaccttaatttgtgatacatactttggtaagcatacacttttattcaatgtgttttagttttaaaatttgtgttgtatttattttgattgtatgtgaatttttttttttttttaaattttcgagacagggtttctctgtatagccctggctgtcctggaactcactttgtagaccaggctgccctcgaactcagaaatccatctgcctctgcctcgggagtgctgggatcaaaggcatgcaccaccacgcctggctgtatgtgaattcttaaaaagagtatataccacccaggtgtagagggtatagaggacagcctcgtggagttggtcctgtcctttcacttttacaagtataggggatcaaattcggcttgatagaattttgcagtaagcacctttacctgctaagcgatactcctgagtctttcattatggttttttttttttttttttttttttgaatactctaaggattttatttaaaatggttttctaatatagaacatgaagtatggtcatggtgatgtcttagtaatacagagaatgacacttttttctaattttatgtagatgggaatgatgaacaatcccagtccttatggttcaccatacactcagaattctggacagcagattggagcaagtggccttggtctccaaattcagacaaagactgttctaccaaataacttatctccatttgcaatggacaaaaaggcagttcctggtgggggaatgcccagtatggtgagtacttagcactattttgttaagactttttcttgtctttttgttttctttcttcttcttcctttcattttggcttttggagacacggtttctctgtgtagccctggctgtcctggaattctgaagtctgccagcctctgcccccacttctgcctggctcttttctctttttaacatttatgtgcatgcagaatagatgtgtgcacaataccatggtaaacttgtgaatgtcagaagtcagcttgcagaagttagttttcttctaatgtgaatcttgaactgtatactcaggtcactataattacgtattgagccactttgtgagcatattaggttggcatttaacacactggtattatatatacttgaccttaagatacatgatgtatattaattacccttgtgccttggaatggaatttcactttgtaaaatttccacatggcattttatttgctgtgctaactgatgagttggaagactaattcacagagtaaatgtgagctacagtgagtccttcagcaggctcgctgtaagccttgttactgaagaataggaagaagaacctttctgcgcttgcaggagattcttactgcaaaggcttctctcaaggactgtgaatactagttttatttctattagtgtaacagtaattttttcaattaacaaaatgattttttgtttttctcttttgggatgaaccaactgcatgagtggctacggttaagcttcattaagtagcatctgtaatggacagttttcatgtttaaaatttccagtaaggtggctctcagtaagtttaggccagccatatctacatagccagttccaggccattccagacctgagataagaccttaaaagaaaccaaagaaagaggacatgctaggcatggtggagcacaactttaatctgtggagatggagactcacacctgtggaggtgtatctgatttgggttcaaacaatttctacttaggaattaaatggtttgtttttacttttgagatttgtcctagaacaattttattttatttacttttacaagttttggtattttgtgtggtattgattgtttgtatttaaaaaaccatacgaagtaaaaaaccaaataacaaaaatatgtcctcactgtcctaaggaataacttctactgggaagagttaatttttttttttaagaggtgtaaaaactatatttgctacacatggtagcacgttttcaattccaatacttgttttttgtttaacatttttttaaagatttcttcttgtgttttatgtgcacgtgtgcatgcatataggctagtgcgccaatataggctagatgagcatcttgggttctctagagctggagttacaggagtctgagttctgcatatgtatactgtgaactaaatgcaagtactttcaacaactgtgacctctctccagtccctatgtgttttttgaggcaggatctggtaacaggctggcttcagacttgctctatagaagattgacttgagttctgggtcttactgttcccttactgagcctctaatactgagaatgtggaaattacctgttcttcctttccgtttagttctctgtgtctaataaatatgtaccattttttatttatatgaatacattgtagttgtcttcagacacaacagaagagggcatcagatctcattacagatggttgtgagccaccatgtggttgctgggaattgaactcggacctctggaagaacagtcagtgctcttaaccaccgagccatctctccagccccataatttattttcttattccattaatctttctgattaagagctatttatcgtgtatacattgaattctttccatccaaaattaaagaatgaattctgacatacagtaggtcaccaccaaggatttaatttgaaaatacctagtccttgttaaaagatggcacacttgtaacactgttaaatatatctttgctacatttgttagggccagcagcctaccccatcggtccagcagccaggcctggtgactccagttgccgcaggaatgggttctggagcacacacagctgatccagagaagcgcaagctcatccagcagcagcttgttctccttttacatgctcacaagtgccagcgccgggagcaagctaatggggaagtgaggcagtgcaaccttcctcactgtcgtaccatgaaaaatgtcctaaaccatatgacacattgccagtcaggcaaatcctgccaaggtgagtaactttgaggatgatatttttatttggtactttgattatgttgatgacattttagacatagacatgttctgacattaaattttgcctttccccctttataagtaaagcaactttgtacaccaggtgagttcctgaccaataaaatacaacttcttgggtgtatgcttgcttgtttgtattgttcctgaaattgaaccctgagccttgtacttggtagaggagcactctattgctgagccattcttctacccctaaatttgccagaggctactgattaggctagtctagctgtcaggtagtttgttctgagagtttagcatcaccagttcccaagcattggggttaacatgatatatttaaggtactagggtctgaactctggttctcaagcttgcattgcaagctcttgactgactgagctgtctttaaaacttttacactacctgtttatacatgataaatattatcagaaagatttatgcaataagaaaataaattatgggtctggagagatggctcagtggtaagtaagtagtagtacatggttagaaaggaagttgtaatagtttgtgatatttattctgttttgttccagtttagccatgtgggcaattactcaacacaatagagttttgcccaactgaatacttctatgtctagtgtcactgttttataggcatgtattctgcactacagtttagaatatctttatatttggagcacttgttaagttgtatgtcattcctgtaaataaaaagaattaacaattttttcttgtttgttttagtggcacattgtgcatcttctcgacaaatcatttcacactggaaaaattgcacaaggcatgattgtcctgtgtgtcttcctctcaaaaatgctggggataagcgaaatcaacagtgtaagtgattaaatcttgctgatttttaccaagttttttgagcagcatactagtgccctttgacagagtgtagactactgcttgactgtttgagactctggtcctgccatgccattctggatgaaagattttctatttctctcttaattagtaaaacaaaaaagaagtatgtcttattcttggaatggagttaagagcatcaactgctctttcagacgtccttagttcaattcccagcaaccacatcatatctgtaatgggatcagataccctcttgtgctgtgtatgaagacatcgacaatgtaatcacatatgtaaaataagtaaatctaaaaaaagaaaatggaaataagattttcgtattcttaaaaccatcaatagatgacaaattttaaaaaaattttttttgcctttagagatagccttgctatgtagcccaggctggcactgaacttgctatctctgtctcagctatctgaatgctgggattgtaattgtgtactgtcgtgtattctttaaaattttcaaaactgaagcattgaagcaagttttttctttttatttatttatttatttcaaatatatgagtatactgtagctgtatagatggttgtgagccttcatatggaattgaatttttaggacctttgcttgctctggtcaatactgctcgcccccagttgctccggcccaaagatttatttattatttttatttattactatacataagtacactctagctgtcttcagacgcaccagaagagggtgtcaggtctcattacaggtggttcacagtgtggttgttaggatttgaactcaagacattccaaagaacagtcattgagtgttcttacccactgagccatctcaccagcctggcattgttgttttggcattgagtgggtagatcaaatgagaaatgttggattggggttagcgggggtttctttttttgattgtcttcaaaatattctctgtgtgacagccttgtctgttctgaaacttgttttgtagctctcctggccttgaactgacagacatcttctacctctgcattccaagtgctgagactattgacttgtgccactgtcacctagccttttaaaactctgtgtgtgtgtgtgtgtgtgtgtgcgcgtgtgtgcgtgtgcatgcacgcgtgtctgtctgtctgtgtgtcagtgtatatgtttgagttttattttataaaataaatttaaaaattgttctcatagaaaagtaataagtaaaaatactacattcaaaaagtgcagctaccatatttttcttagaaaaaatattaagtattaattgttaagagaaatttggagctatgtatcgtggtggcacacatctttaatctcagcactagggaggcagaggcaagtggatctgaacttgaagcaaggtccaactcggccagctttacacagagaatccctcacttgaaaaaccaaaaatttgcatgtgcatatataaagcatggatctagaaagtttttccaaaaattaattggagggaaacacagatttctactactctgacacatcattataataagacttttaaaaatgtcatttaagcattttaatattttttctaaccaactgtagtggtctaatactgtgtttttgtcttctctagcaattttgactggagcaccagttgggcttggaaaccctagctctctaggagtggggcagcagtccactcctagcctaagcactgttagtcagattgaccccagctctatagagcgagcttacgctgctcttggactaccctatcaagtaaaccagattccaccacaaccccaggtacaagcaaagaatcaacaaagccagccatctggacagtctccccagggcatgcggtctgtgaacaacatgagtaagtgtgtcttccagtccagacgtgatactggttaaatgtgaacatagcatgtataaatcaaaattaacctctccctttccctgttcctgttcttctatttctgtttctgcccttctccctccctacatcttctgtctctctttgttttattttttactaaatgatttttggagttgaaatatttttaagttatagcatgaagagcacccttaatagttcatatgctacaaacaattactgccaatgcttcatacctttttaataccttcctcttccttttgttcttcatagttgagtttgaatttccagagatgtgtcttatggacctttaccccgagtgatctcattggccaaccctagttgttcttgttttacttttgttttttcagacagtatctttctgtatggtcctagagtttgttatgtagaccaggctgacctctgcctcccaagtgatggcattaaagccatgcaccaccacacctggctaaagctattcttgtttttaaaatgttaaattttggtgtgctgtagtacctgcaagaagtattcctttttggttttggttgctgttgtttgtgtgtctttgtgcgcgtgtgtgtgcgcgcgcgcgtgtacacacacacacacttttttttttttggttgttttcagacaaggtctgtatttatgaggttttttttccccttgcttgtatgtcattgcactacatgcgtagagtccagaagtgaggtggcagtacgctggaactgaagttcccgatgttgttgttggtaatcaaacccagatcctatggtagagtagtcagtgctcttaggctctccaacttctgttttgtttttaaagatgtttttactttcagtattttttaattatcttattttttattttgtgtgtattggtgtttgctagcatatttccgtgtgaagggattggatctatggaactgggattacagttatgagttgccatgtgggtgctgggattttaagctgggtcctctggaagagctgccagtgaatgctcttaattgctgagccatctctccagcccctacttttcactgtttttaattgtgagagtgtgtgtgtttgtgtacgagcattctctagcctccccacgcatgtttatgtgtgttcatgtgtccctatctataagtgcatgtgtcttaacactaagccatatctccagcctatcttgtttgttctatattttctcactgggactttcagcatgccctttatgctctgctgactacgtacagaaccccagggactgtgctgtcttttccttcccatcactgagattacaagtatatatactccatcgtaggtggtgtggaatttgagctcaaagagaactcctgttagcatggcaagcattccatatcaagttctccagtcctttttgtttgtttttgggttgtttggtttggttttgttttgtttgttggtggtggtggtggtgttgggtttttttttttttttttttttttggtttggttttttgagacagggtttctctgtgtggccgtctgtcctggaactcactttgtagacaaggctggcctcgagctcagaaatcctcctgcctctgcctcccaagtgctgggattaaaggagtgtgccaccaccgcttggctccagtcctatttttgttttttaattttttatttttctggattttgcccatttctgttcaccactgtagagcctgtggtcagaagaggtcattaactttctttgattggaaatttgtataattgtgggctgtcatgtgaatgtcaggaactgagcccagatcctcttcaaaaacagcaagtgctttttacctctgaaccatctttcaagcttcaatttttgtttgtttttgttttgagaaagggtctctgggtaactctgactgtcctggaactcactttggtagaccaggctgacctctgacttagagatcagcttgcctttgctttctaagtactggaattagaaatgtcatgctccctacccccttttttgagacaaagtctgtgttttcctatttcactttctgccttattttttgagtctctgatgacgacgacgactactactactactacttcttcttcttcttcttcttttgtttttttttttttttttttttttgaggtttttttgttttgttttccgagacagggtttctctgtatagctctgactgtcctggaactcactttgtagaccaggctggccaccaactcagaaatccatctgcccctgccttccaagtgctggaatcacaggtgtgcaccaccaagcctggctcaagtctctggcttctttattagcctggagcttcctcattgtctagattggctaaccaatgaggtctggagatcattccttttggcaatagagtgacatttgatatcaccacagcaatgttttatgtatgtgtgtgagatttgggctctgtccttttgcttgtataccaacactttaccagttgagtcctttttccaacctctgtgcctctttttttacttcatgtgttattaattgcgttgttttctttgtttatggtattgtttttgtggtacctactttatttcttttgttgctttgttttgccctaggtgctagtcctatgggtgtaaatggaggtgttggggttcagacgccaaatcttctttctgactccatgttgcattcaactataaattctcaaaagtaagttgtgccctgagtcccttcaaattcttaagaatttcttcttttatttagatttcttaatttgcaggtagctttaaggaaaggaatgagcaggatgtccatgtgtatgtatgtatgtatatacacacatatatacttgacatgtgagtcacagacttggtttaatctataccccacaggtacagaagcagggagttgcagtgttgcacctagatctagtgcattctttagagatggatatcatcagaatgtattgtgcacatgtatgaggttttcaaaaattatgtttctcctaatgtgcttttcagttattgcttaatggcttttgtgaaagttaaccatgtgtctacatggcaacacagcctagtgacatgacttgggtttttaaataaagaattcactctcatccttcataaggaaatgtaacacttttctttattgaagtatgtacacacacgcaaaacgtgtagtctcatacacttgccccttaaatagactcagtcaccattcatcaaagtaattactgttagctctaattaagtgaagtctgtctccaatacttattcactaaacctactttttcttcgatttctaaagcccaatgatgagtgaaaatgctggtgtggcctccctgggtcctttgccaacagcagctcagccatctagtactggaattcgaaaacagtggcatgaagatattactcaggatcttcgaaaccaccttgttcataaactgtaagnnnnnnnnnnnnnnnnnnnnnnnnnnnnnnnnnnnnnnnnnnnnnnnnnnnnnnnnnnnnnnnnnnnnnnnnnnnnnnnnnnnnnnnnnnnnnnnnnnnnnnnnnnnnnnnnnnnnnnnnnnnnnnnnnnnnnnnnnnnnnnnnnnnnnnnnnnnnnnnnnnnnnnnnnnnnnnnnnnnnnnnnnnnnnnnnnnnnnnnnnnnnnnnnnnnnnnnnnnnnnnnnnnnnnnnnnnnnnnnnnnnnnnnnnnnnnnnnnnnnnnnnnnnnnnnnnnnnnnnnnnnnnnnnnnnnnnnnnnnnnnnnnntgccagaattaaaggcatgcaccagcactgcctggtctattctcttaattttcttaattttattttaaaagtatttttttcactaccatataaattaatatgcctagattccagattaattagattatttttactacttttaaatttactttaaattgtttatctgatgctcatgagatagatcagtgggtaaaggctcttgctgtcaagtccacaccccagactcacttggtagaaaggggagaattgactcctgaaggggtgctgtgctctggccttcacactcattccatagactgcacacatgaacaacaaacatgttgaataaaaatcattgatttttggatctggcagtatggctcagttagttagattttattttatttatttatttatttatttatttatttatttatttattttatgtatgtgagtactctatcttcacttacaacttgcatatcagaaaagggtatcagagcccatcacagatactgtgagagaccacgtagttgctaggaattgaactctagaagtacagacagtgctcttaatgactgagccctatctctagcccttctcacacattttttattttattcatttatttattttgagacaggtttttctctgtgtagccctggctgttctggaactcactctgtagaccaggctggccttgaactcagaaatccgcctgcctctgcctcccaagtgctgtgattaaaggcatgagccaccactgcctggcttctcacacatttttaagtcttttaaaaactgctgttgccatatattttgcagggaatatagtagggtttttttgtttgttttttgttttttgtttgtttgttttgttttgtattttgaggtagggtctctttttagtcttagttgtcttggaactggatgtgtgggccaggatagccttgaatttagagattctcctgcctttctacctgctgagtactgaaattaaagatgatggccaccatacccaagtttacaatctgaaaattctacaataggaaatttgcatttttttgttcttcctttatgagttcttaaacatgtttgcgtcgttattgggatgttttctctctctttatttactttatatcccaataattgcgccctcctctcgggccccctccaactctctccattttccctctcttcctcctctgacagggtagagtcatccctgggtatcccctcaccatgatatatcaagtttctgcagtaataggcacttcctctcgtactgaggctagacaaggcagtccgggtaaaattatgtattccacagactaataacagactgaagcccaagctgcaaatatgctacatattgttggggtggggtgcctaggtccagccctaccttgtatgctctttggttggtgattaggtctctttgagagccccaagggtccaggttagttgattctgttggtcttcctgtggagttccaatcgctttaggggccacaatctttcctcctattcttctagaagagtcactaaactctacccaatgtttggctataggtctctgcattttagtaatagtgtctgagttttagtaatagtgtcagggactggtgctttcccatgggatggacctccaggtggactggttatcggttcaccattttgtttctactccatcttccatccctccatttcttgtagacaggataaattgtgggctgaaagttttgtgggtgagttgatgtccctgtcgctccattgaagttctgggtgtttgttttaataaggaaaattcatgtaaaagaactattaatgtctaaaggctcattatactagaagaaaagtcagatttttctcagtttatgtagcaccccatactattttacataatcacaaagactagaaagtaattaattttatttacatgtatgtgtttgtgtgagcttattgtatgtggatgtgagtgcaagagggtgtctgatccactggagctctttgagattggtactaaaaaccaagctggatttctctaacagaaagcagtcccaaaagtatttttatgaggatacttttgatgattacaaaaccttttatctatcactaataagtttttaatattgtaatattaattttctttaagaaaacgttccagggttgtgatgcccaacacctttaatcctagcacttaggatgtagagacaggctgatcgctgaatttaatgccagcattttgtacataagagttgaaggacagccagggctatacagagaaaccctatctccaaaaataagaaaaatatgttcaaaattagggataccattagagaagagtaaaactgggcatgcattattctgttgctgaattttgaaaaataagagtatttgtagtcctagaggggtggcttatttaagaactctggctgctatgccaaggaaccatgtctaacccagcccacccacatgatacatcacagctgtatgtaactgaagtcctggtatatctaatccccttttctgatcttctggcctctgttggccttgcacacacatggtgcacggacatccatgcatgtaaaacatgtaaagatgagacttagtgaacaacttcaaattaagtgtggggttttttgtttttgagacagggtttctaggctgtcctggacgcactctgcagagccatgctggcctggaattcacaggtccacctgcctcttcctctcaagtgctatgtaaagatctgggccaccatcacccagccaaaaaaataattttatattttatgaatgaactgtgtccatgctggtcaaggaaaaatgtcacagtattgtgtggttttgtcttgtgaatttgggtaaagctgacatgttagtacagttgttctattttatgttctagtgttcaagccatatttcccactccggatcctgctgctttaaaagaccgacggatggaaaatcttgttgcatatgctcgtaaagtggaaggggacatgtatgaatctgcaaacaatagagtgagcacataattgtttttcttttctgaagtaggactgttgagttttaacctacttgtcttgggtaaggcagggtagcatatgttttttaatctcagtactctgtaagcacaggtgtgaggatctgtatgggtttgaggccacatcatgagaacctgtctcagaaaaacaaaagataaatttagttgtcttctataacatgacagctttggttttcttaggaggattctctttagttttaccgacccaccttcccagtactgaacagttaaaataaaaaagcagtttattgatttgagacaagttcccatgtaaaattttctggtctctgactcccaggtgctaataagatttcatgtggcattactaagcttagccaacaaagcagtgtctttaagtgtatgtcaattgtcttacctttttttttctcattcactctctcttccctttcactttatccttctccatgttcgatggctgtcctgcaactaactctgtagatcaggctgccctcaaattcagatctgcccctacagttctagtgccaccatgtgtagcttaccttttcttaccatgcattatgtgtgacttaccttgaacagttgctgtactgttaatagttctgtgctgttttctataatatggggtgaatttgttttgtaaactcatagtaaaattattaatcacacgttataagtatgagctcatttattaatgttttttgttttttgttgttgtttttggttttttagttttttcaagacagggtttctctgagacttgttctgcagaccatgttatactcaaacccagatctgcctacctttgcctctacagccagctttagcttttacctatcgtttaaatgaaccaatatttgcttagttcatttttttctgttactcaatttctcttttctcctttttacttaaaatttcttcaaggcggaatactatcacctcctagccgagaagatctataagatccagaaggaactagaagagaaacgaaggactagactacagaaacagaacatgctaccgaatgctcctggcatgggtccagttcctatgaatactgggtcgaacatggggcagcaaccaacaggaatgactaccagtaagtactttttattatatgtagtataagaaaataatatatccacttttaaaaacgagtggaaaaatagaacatttatgaatatgataattggaataatttgataacctacaattatttttactcctcaagggagccttccaagtagaaaatagcagcttccatatttccattggctttctctagcatctactgtcttatatttgacaggtagccagtaggttttggtataccaaccatcttcagggctcaatggaaatttgctaattgcattttattatccaggggtttttgttgttttgttttgtttctttggttgatagtttactttggtttttgttttgtttttagtttttttgagacagggtgtcttaagtgttcttttgctataagagatactatgacctgggctagagagatggctcagtggttaggagcactgactgcccttccagaagtcctgagttcaattcccagcatctacatggtggctcacagccatccgtaatgggatccgatgccctcttctggtgtgtctgaagacagcaacagtgtgctcatgtaaatgaaatgaataaatcttaaaaaaaaaaaaaggaaaagaaaaaaaagagatactaagaccaagaccaagaaaactcttataaaagaaagcacataactgggcagatgcttacagttttagaggattaattagcccgtgatcctagtgggaactaaacatttgtagtacgggatcaggggttgagagctttacattctgatccacagagggagaaagatagacagacagaaagagactgggtgtaactgtgcttttgaatcctcaaagctcgtgacataccctcttcaaggactatgctcattccataaaggcaatacttcctattccttcccaaatagctccactcactagaagccaaagcattcaaatatgagcctattggggctgttttaggggtctcactatgtagagcaggctgcccttgagctcacagagttttgcttgcctctgcctcccaagtgctgggataaaggtgtgtaccaccatacctagccatatactttagtataaacagcttcacattacagtaacattttactgtatattccaaggctaaagacagttcaaaaggtatcatttcataatatgtattaacttacatttctgatttaacaccattcttgaccttaagtaattatatgtgtgtatatatatatatatatatgtatatatatatacacacacacacacacatatatatacacatacatacatatatatgtgacttatcaattatttaattcatttattgacatacttttagatttctatgtactaaaatacagagtaagaagtagttgggaagattagcagaaggtgcttaaggtatgtgatatcagtatctgttgtgttgagtaaaccaacagggcaagcaagtgtgaatcttagcagctgtctagaggaggatggaacagaggatgaaatgaaactatgtctttttcaatggaggtcagcaacaaagacatggccaaagtgcagagaaagaactccagcaaataagtgaaaaaaatccaaagtactggggaaagtgtgctttaggcttaagtttttggctggtaacagaaggaaaactcttgaagtagaaaaagctgcaggctgtataatggaaggtctgcaatcagctctggtttgtttgtttctttgaactggttctcaaattggacttgaactcacagtaatccttcttttagcttcctaagtgcttggtccaccttacccagaacaatagaaaccgctgatggtggttcacttgaacacaccacacagacgttggagggcaatttgcaatagtcacttctctacttttgccttgtgggtcctgggtatcagactcaggttgtctgattcaaaagaaagcacctttattcacagacctgtcttagtggactagcactctactctgtgtacctggttgaaagtgtttaactaggagatgtagagataatctaacaagatatcacacttaaatgttttaatctcatcttaagttttatatttaagaagcataaaatggtctagtataatatggagtccatttcttgagattcttgtccagttagagattgtttaagctattaatgcttgatgtaattttgttgtttttaagaaacaaaagtatatttaactatttgtgttttccactccagatggtcctgtacctgacccgtctatgatccgtggcagtgtgccgaaccacatgatgcctcggatgactccacagcctggtaacgtttgaaaatgatacatggttgatttttttttttttttaaacatggttgatttttaagagtctctgatgtagaacagaatgttgcttgccaccttaattcctgatttaacccagcagcaagtcttgtaatagtctgctttggaaatttgaaagtttcttgtagtagaaatccacaaagagagggagaatgagaaattgagttgctgacaggttcaggagtagaattcagtaagtaagtaagcaagcaagcatccgttgaaaaccaactcactgccaggcataatggtgctcgcctctaatcacagcactctggagtcggaggcaggtggatggcactcttgagaattcaaagcctatctgatctacatagtaaattttagactaggcagaaatatatagtgaaaccctgcgtcaaaaataaactaaaataataataccattactaatttactagctggcagtgaacatttgggaagcagggtcatgtggatgtttataagttaaagtgtgagttcaggctaaccagcactacacagtgagactctcttaaaaattttaaagtaacaatttagcatgttgtaaattttagtttagaaactatcaataataatcttgctttggactagagaattggcacaaggtttaagtacactcactgtctgctattccagaggaacgccaacagctcacaaagaaaaaaactataataagccaaaaaatgccaagtggtggtgcactcaggaggcagagacaagcagatctctgagttcaaggatagccagggttacatagtaagatcctgtccagaaaaacaaacacatgcatacatatatatgtacatgcatacatacatacaacaaataatatccttgtttagctggtgattcagaatatcaatattactttgttggtcctaagaaaatgagcagaatctcatatcaacttatgtcttgttcttaaattcaacaaaagtattgaaatattatattcacaggtttgaatcaatttgggcagatgaatatgccacagccccctattggaccccggcaaccctctcctcttcagcaccatggacaattggctcagtctgggtcactcaatccggttagttttatcctttctaccctttaaaaaaaattcttttttctttgttacaacttcaggaaacattactgtctaagcagaacacgttttagttcttgcatgtatgttcttccatgtgtgttcagtgatcaaagtgaagattctcagtcttagttacaagtaccttttatttctgacacatgttgaccacatgagacctcttttaatagtgtaattttcatatatttggcctttaatattacatagtatagcttagaatgtatctcagtaaaagagcacgtagaagacttggttgtctcgttagcaccataaaataacctccaatcccagttaagtagactgtattttatagatgagagtacgtttagttgttagtcatccaggatttcactatgtagctcttaactgtcctagaactcttcatggaaaccagtctgactgcaaagtcagaaatcaggttactgctcacttccagagtgctaggattaaagatgtgtgttatcatgcctggctaaatacaaaatctgaaagaactggagggtcaggaattaatatacaacacaattgatttgtgctggcgagatggtgtgaaagtataagcaactgaatcttagatccccatcagcccataaaatccaggctatggtggcatacactttgaactccagtgctacagttggagatttctgagagctcacgggctgtccatcccagcctaaaatgtgaactccgggttctatgggaggccctgtctgagaaaatgaagtggaggacctgggtaaatagctcaggtagtcggagagttgttgcttttctatagcattctggctcagttggtcagtgacgttatatggtggttcaccaacatccatgactacagagctagggtgtatgttaacatagtctgacttccatgactacctggaatgtgtgtgatatacatatgtacatgtaagtaaatcatacacataaaatgaatcataaagtagcaataatatgtttttaaaaacaaaatgaggtagagggaaagtagaaggtatattcctattgctatggtaaaataccatgacaaaaagcatcttaaggaagagttttattttggcatatgattccggggactagacatgtatagtggcatgttaggtatggcagcaggagcacaaatcttgagatgtaaaaggggattgtaagtctataaactcaacactcacttactgacatagtgtccaaaaaggctatatttgctgaagatttcataatagtgcccctagctggagaccagattttcaactgaccacgactgtgcagagaggtttctcattcacattactgtaatttcttatttctccatacttccttttattaaatgtctagactcatgtaaggcagttttagaagagaaaagttgtttgtttcttgtcagagttctagatatcttggagccctgtgtcccttcaccttcttctttcttgaggttgtgtttggtacttacaagcctattcctattagtttttacatgactacaagttctttcacttacaccttaggcttctcttacccaagctattgtcttttatttttctctatgcaagaatctggatagtagggcaagagtgattgctaattacagttggaaaataattataatgaagcagttggtgacctatggtttgttgtgtttctttctttttgtttatttgcagcctatgggctatggacctcgcatgcagcaggcttccggccagaaccagttcctctcccagactcagttcacatcccaaggaatgaatgtaacaaacatgcctttggctccatccagcggtcaagcaccagtgtctcaagtatgtttatttaaaattatgcttaatgtgcacatatagcacacatacaggacaatagtatgtacccgactctccttcttcctctctgtggtgtctgagagtgtatgcagatttccaggcttggcaggcagagacattctttcctgctgataacaattttcatgagaaatagtctatattttcttttgttcaaagacaggtctcaccatttaaccttggcctttaactcagagaacaaacctttacttcttagaaatatttatttggagttttgagactagatctcatgtggttcaagctggtgcctgtgactccaattccagtgggtttgatttcctcttgtggctgctttctagtcaggcatgcacaaatcctaatcctgtaggattttcaatgttcccccttctttgaaaactgattatgttcaggcatacatacttttaatccttgctctggagacaggggcaggtgaatggatctctcttagttaaagctagccaggtctatatagcaagaccttgtctcagaatgaaaaatgttagatactgttttttatttatacttaccatgtgtactaagtactatatgttctgcctttgtgatatcatatatttttcgttttcacaggcacaaatgtccagttcttcttgcccagtgaactctcctataatgcctccagggtctcaagggagccacattcactgtcctactctgcctcaacaagctcatcagaattcaccttctcctgttcctagccgcacccctactcctcatcatacccccccaagcatagggaatcaaccaccaccagcaacagcaattccaacacctgttcctacacctcctgccataccacctggaccacagcccccatctctgcatccctcatctagacaaacacctacaccaccaacacatctgcctccccaagtgcagccttcacttcctgctgctccttctgctgaccagtcccagcaacagcctcggtcacagcagagcacagcagtttctgttcctaccccaacagcaccattgctgcctcctcagccttccactccggtaagtagctgtgtattggagtgtctgtagaacaagttaagctccagcaatgtttttgtttttctttatcatggttttgtttagttttgcttcccattttgctttattctatgttctagggtaaaaaagtatgtcatcacaatatactttacatacataaaaacattttgaaacagattaagttgcagtactgagaaattaaactaaaacattatgggactaattacacgtaaacacacaagtcagaggacaacctgtagcagtcggttctcctctctaccagggatcaaattctctaaggaagtcctctttggaactaacaccaaaaacttggtagctgttcaagtaaaacaaaccagccagcattgggagtccagtaccaccacctccacctcctcnnnnnnnnnnnnnnnnnnnnctgcccagttgaacagaacttctgagagtgtggatcttgcctttttctggtcttagagaaggtttgttcagcttctcaccatgttatgtaaaagcttgtaacatattattctgctgaggtaatttacttccagtcagagtgtgcagagggttttgatttcatcaagtgctttttctgcttctacagcaataatcacccattgctgcttgtgttgaatttgtgttatcattctatcaatatgttgaatcatagtgattgattttcttattgtctgctatccttgaaatccagaaaaaaatctcatttggacgttgtacacaattctaaaatgctgttgaatttagtttgctcctgtttgttgaaaagtttgacatctatgcttctgaggaaaattggtatatatcagctttttctcctctcctcctcctcttcctcttcctcctcctcctcctcctcctcctcctttttcttctttttttttttttttttggcttttcaagacagggtttctctgtgtagccctggctgtcctggagctcactctgtagaccaggctggcctcaaactcagaaatcctcctacctctgcctcccgagtgctgggattaaaggcgtgcgacaccacacctggctccgtacctcccattcttaagatgagctgagtaagagacatcagtgggtccagtgacactgctcccaacacaaatggtcactgctgtgtaacttaaagttaaactctaagcaactgacaagcttttgtgtgcttttctttttgtctctccagctttctcagccagctgtgagcattgaaggccaggtctcaaaccctccatctactagtagcaccgaagtgaattctcagaccattcctgagaagcagccttcacaggaagtgaaaatggagtctaaaatggaggtggataagccagaaccagcagatgctcaacctgaggatacaaaggaggtgaggttcttatgaaaggagactggaggagtgagagagtaaataagcaaggtgatagtaatggatttactcccagggatctgtctgtaaagtactgaaagttcctgtcttgcctttcaggctaaaggtgaggatgttaaagtagaacctacagaaatggaggagagaggccctgagttaaaaactgatgggaaagaggaggaagaacagccaagcacctctgctacccagtcctccccagctcctggacagtcaaagaagaagagtaagtaaaggctcaggaggtcacccatttggtaaaatgcttgtcccacaaacactccaggtctgaatttgtttcccaccaattgtgtgcatgcttcaggtgtgtgaacatctttctttaatcccagtgcttgggagccagaggcagaaaaatctgaattcaaggctagccttgtttactacttagcaaattccagataaagctgaggttgacagtgagaccctgtcttatagctgagcattggtggtacccttgtaatttgacaactggtgaagtagagacaggaggatccctggaacttgctggttggtgagtctaggccctaacactactaagactccaatttggcaggtgttggggatagaggatggagagaggtaagagggcttaactgcttttacagaggatgcagactggactcgaagcagctccctggaactccaattccagggaccaaacacccacttttgtcgtcaggctttagtacataaattcacacaaacctagaaatacataaaatgaagtattaaatgtggaaaacaagattatttacctgaatggaaacactcatctaatgttgacccttcgtctacaaacagagagacacagacatacattacgcaaatggcagccatgctggaaagactcctgcaaattgttgtttaaacgctccaaatgcatttgtgcacaggtacacaaatgctcacagataaattaaattaaaaaattttaattatcaatctcttatttcttgaactcttcatagcttgcattccataacagaaccttaatgtctctatatcccacaaacttacctcaaacatcttcctgcattattgtgcctggtgttagaagtgctgccatgtgcagctaccccagttcaaagaggacattgccagctccgcttgacagaacccacccctctttccacacacagcttttggactgtttctttgcgaagtctcttctgtgtttttaggagcctttgatttctgtttctatttggccaagttcattctcaataaacctgcagcaggaaaagtaactcatctatgagggatggaatagctctgttgttttacaggaagtagttaaatcagagtgggaattaaaaatagcaagtgagcccttagtcagggttctctgaggaccatgtcacctcagtgtctcggatacttgagatgcttttagaactttgaacatgcatgtctttaacatccctttgctcagtcagtaattaatttcaatggactctccctaaagttttcaaaccagaggaattacgacaggctctgatgccaacattggaggcactttaccggcaggacccagaatctcttccctttcgtcagcctgtggacccgcagcttctaggaatccctgtaagtatttggtatttttctattttcttttagatagagaaacaactttattaacatgattgctgttacagaagttaacctatgtacagtgtacaagttttagcattttcattgttatatagctatcaccatggttttaattcattttcataacctcccccaataaaccccacgtccattaaaattgctagttgcagcactcttactttcccagccttaggactgcctaactcctggattcttctagtttgaatcacactcagtgtggaatgaaagcttagcaagtgctttgcactgacccctggtcaccagtacagcctttgaggttcttccatgttatgtgactgtgtcacccagtgcttcctttaaatcatttagtattcagttatgttgatattactgcattttgtgtatgtatttaattgggaagttatttgcagttttgggctattgagactatggctgctgtgaaggtcggtgtacaagtactgctttgcctattattggttaagattttgagagattctctctttatatctcatgttatccttgaacttgtaggtcctgccttggccttcatgtactgatacttcaggagtgtgtacatttttatgtgttacagattgatttttctctctggtatgttagaggtcaataattcactatcatctcaacagctatagatcacagcagaaagatgagtcccttggttctgaagatttatgtgtatgatctctctctctctctctctctctctctctctctctctctctctctctgtgtgtgtgtgtgtgtgtgtgtgtgtgtgtgtgttggtgtgttggtgtgtattttgggtgccaggttcctctgccgaaagagagtggtaagtccccatagaagtggagttgaagatggttgtgatctatcatgtaggtgcataaagctgaacctgtagcctctataagagcagcaaatgctttttaactgctgagccagggtctcttcctctatttcaaccctcaagtttggggttttatttttgttttgtttttttttttgatatgagggttgggttagggtgtgtatgtgtccctggttagcctgagattgactctgtagaccagactatcttcaaactcatggtcatctacttgctttcccaaagttagctttgaaatgtttgaacattgtaatgtacccaggttgcttgctggttttataaaagattttcatatgtgtttatttaggattttttttccatgtttttctgttaccttagaacactgattctctaggatttgtatgcccttctagtacttaatcctcaaaacctcttaaaaattggtagattcatattttaaagaagtgacagacttcaatcaactcgtgggacgacatatcaagacacataacattatgtggaaaattaatgacgataataggaagacactccctcttccctaaataccctgctcatgagtatgtgatgtggtgttgcttacacttttaggattactttgatattgtgaagagccccatggatctttctacaatcaagaggaagttagatactggacaataccaagagccctggcaatatatagatgatatttggcttatgttcaacaatgcctggttatataaccgtaaaacttcaagggtatacaaatattgctctaaactttctgaagtatttgaacaagaaattgaccctgtcatgcaaagccttggatactgttgtggcagaaaggtaagaagtatctttcagacctgtctttaacttctaagataactagaatctagtcgtgacttgggttaaaaatatgctgcttctgactttgacagagtctccccatctctgttcctcttctcatatggctagaggtcaaaacagatcattgaatcactttaccagtgtgctaccaaccccaacaagccctttccttgatacacaatgttgtctgtttttaacatctataagaattgtgtggcagagttgagccttcagtgtattaactcatcagactaagctcatgtaggagcttcattatgtccctatagatgcagcttgctccacacgtgacgctttctcgtcctcagtataaccacttactgtgcctataggtatttgcaaataatatggacagatatgcctgctcagcctgatgaaaactgctggtggtttttaaaagtttgtcatggctgactgtgattgatctgagagctgagttgccactgacttgtctgtggtctgcctttgtcattattctgccttggactacaggtgtttgcactcttaaataaatactttcttttgcagttggagttttctccacagactctttgttgctatgggaaacagttatgcacaatcccccgtgatgctacttactacagttaccagaacaggtaagcttaaccatatgtggaccatggtccatgtgtccttgtatatagacctacgtgcaatccagatctcgagtgtggggacacacgcacacacattgtggtttgttacctgctttaaaacatatgtattacatacattcctttctatagtattttctagtttaaaaaaaaagttgcaagttttgtgaaccttatctcaccctaattcttggattatgactaaaaagctctggagagtgtttactttgtgtcaggcaaattagaaacaaagtaatctcccagagctgatgtctagctaatttgtagagcacttgcctggcatccatgaagccctgggtttgagcttagcaccttgtatacggattatagtggttcaaagctataattcaagtcctggaagggtagaggaggttccgggatcacttcaaagttgtacttgactggctatataagtaaatttgaggccagcctagatggcataagaccctgtctaaaaaaaagaaaatgtgaaaaaatatatatacacacattgttttaactatgtaaacatgagtatccaatgttctctgccttagtcttcacttacccagtagctgtatacactaatcacttgatcgtgtataattaatctcttattggtagtaatcatacttcattagagatcatctagtgtttgttcttggatctctgcaacagacctgcatatctaagcagtgattgccctgacctgtttaacgctgccaacactggctcagaggttaagagtactggctgctcttcccaaaggacctaggttcaattctcagcaacctcatggcggctcacaaccatttgtaatgcaatcatttcactcttctggtttgcatgagaacagaacattcacatgcgttaaataaataaatcttgcatgggtggtgggcagtgcacaccatatatatacatacatacacactctgtgtgtgtgtgtgtgtgtgtgtgtgtgtgtgtgtgcgcgcgcgcgtgcgtgttgacagcagcactgtgtagtgaaaatcaagcagtatggttctaagtgaaaggtcttttttatttggtgtaatcatttgctacctgtgatcccattgaaatatttaatgctaatatgtgctttgccttggctttctgctttgtgttgtcttgtcttgcttttgttttttgttgtcttgcaatccctcatttcttcgtttgttttgtttttttttcctcccccatgcttgtcgttgtctgcgcttggctttgattgcaaaaacaaacaaaaaaacaaaaaacaaaacaatcaaaaaaaacaaaacaaacccaaactgtggggcccataaatctgcatcattgaatgtccttgtcgccgttgatgacctgctctctgctcccgttcccctccttggcctgctgtgattggtggcttcgttgcttggcttgggctgtgttgtgtgaacggaacagttcaccccagtatggccttcttgccgacaggtatcatttctgtgagaagtgtttcaatgaaatccaaggggagagcgtttctttgggtgatgacccttcccaacctcaaacgtaagtaactacgttttgaatctgctcttttaattctccattctcacaggattgttctcacatgtagaagtggtcttagactgttgtctgtccaatactgtatcccaccaatcatcggttactgtttaaatacaaatgattttgtggtaaattacattacattgtctccgttgccttctcacatagaggtacctgtacttttatctctggctactcaactggttagcctagattctgttaacaaagttctgtactaaaaattatctaagcattggacagtcatcttagtcataataataagtacttataaaagcataccttctcttctaaaaattgaaattttgtacaaaagcatttcattattaagtatattgagtttgaatgaggttatactcataatgccctatatcttctattgtaggttaacagaatacccctagttagtagactttactgtatagctttaagtaagcctgcctggaactttgtaatttatttttatacagcaacactttccctttcagttactgttgaaatacagtgtagtaggctctggttgcctgtgtaggagaatagatgctaagaacctacaaagaggcattttgactcttagcagaaccagagaagtacacactagggaaggctttcctgctgtggaaaggaaagtgagtcatttatcttacatttattatgtaagatatgcttttaaattagttttataggggagttgggggtcctgggcagtatgggaagtgatggcattaatactatgaaatcaaacatttttacccttggaaccacagagtggcctgtgaggtattctaaactttaaatcagtaagactctgaggttagtaagtgtaaaattccctgcctggctctgcaagtctataatgagtctaaaaagtttaaaagttccatgtcattctggatgctcttggtctttgggtcttctatcaaggtctaaggacaagcaggaaggtgaatgaatcttgagacttttatttattatgtaaaatatgcttttaaattagttttataggggagttgggggtcctgggcagtatgggaagtgatggcattaatactatgaaatcaaacatttttgtccttcaaatttagtctgagatagctgcaagaacctaaagcatacaccaggcagtggtggcacatgtatttaatcccagcacttgggaggcagaggtaggtggatttctgaggtagaggctaacctggtcaaagagtgagttccaggacagccagggctatacagagaaacactgtctcaatataaaaacaaaaacaaaaacaggacttgaccatcttattcctaaaaccaaacttccctcaaatacagaggggtggccttttgtgtgtgtgtttttcccctatccctgtaggatctcactatgtagcccaggttggtctgtaatttcagatcttcttgcctctcaacactgggattagaggtgcacaccaccatacctacctgtcctctggttgatttctttgtacttcttggaagagtgataagggtagggtattactctttattctagactccaggcagttctccatcctcagcctcccaagtcccaagtaaaactattcttttttgtttttatttttgtttttgtttggttttgttcttttccaggacagaatctcaactacatagctcttgcaaaactcactatgtaaaccaagctggcctcaaactcacaggtccacttgcctctgcctctacagtgaacatcatgtttataatctgggaacaactggttatataaactagacactacatagaaccagatttcaaaatagaactatacatacaacatatttaatctgcactgcagaggcagagggaggtaagctctgtgagctcaaggccaaccatagctacatgcgaccctgtttcaagaggatttgtgtgtctgctaattatgacatcatagattgcgttatatacaactgcattttctatgacccaaaaaatagtcacagaaagtgaattttgttcaaagagcattgtatattcaagtagtcgttatttttgtttgttttctcattatgtctattttctttccttagtacaataaataaagaacagttttccaagagaaaaaatgacacgttggatcctgaactgtaagtaatttcccatgaattatcggtatactctctgccctttttttttttttccttcaagataacctaatgttcttgcactaacatctgcctatcataaatattacagggcctaaggccatctatagctttacagttagtgttcatttaatgttccctgtcaaacagcacactgcttctgcccagtgctgtgctctcctcactgcatttcctgtgcatcctcagaatcccttagcctacctgtcagctttctgagcctcgtgcattcaagaggacatgttccctcttctaactctgaattgagagcagctgcccttctggattaaaatgttaggttgttggtaacatagctgtgctttatcgcttctgaaacttgccctccctataacataaaagccagaaaaaactccactaaactaattttttagctctttgggcatgacagttgtcttttgatagaatttacagaagatactggacatgtttgtcaatgatgcttcagaatcttagaattcatgctgttcatttcaggtttgttgagtgcacagagtgtggaagaaagatgcaccagatctgtgtccttcaccacgagatcatctggccatctgggtgaggcttgagacattagcagatctgttttattttctttccaagagcattcttttccataactgttttgtatgttcaaagttacagattttgttagggccttactatgtaggattggctggccaggaacattctacctcctgagtgctgggatcaaacgtgtacattgccatacctggacgaagcagtgttcttctaagcattttctttaggatgagtttagctcatttgtacaacatatgcctgtcagtttggctctgggttttatcctaacactgccaaaactgttttttctttggattggaaaaggatcagtacaaacccagttttaaactataaagagcagctgagtagatggcacactggataaagcacttgctacttaaagtataagatactcaaaacatctgtaatagctctataggtatggtacccacctataatccctgccttttgtaggtagattcccatatacatttatctatttttagatagatagatagatagatagatagatagatagatagatagatagatagatagatagctatctccatacaaggaaggaaatgttatgttgatattaaagccagtattagctgtaacaatttgccagatttgaaagtgtttactgataactacggtcttaaaagggaacaggtagtggtacaaagtcaaggaatacctagttgtccttcctgaagcatcctaattggaatgatataataatgagtcttggccaggctgggggaccagtaacttacagactcatagtatttcaaatgagagtcagaaatgatacttttcattttgagagaaaggggctgactttttgggttttttgagacattatttttctctaatcctggctgtcctggaactcagagatctacctgcctctgcctcccaagttctgggattaaaggcgtgtgtcaccactgcccggctaaagggctagtctttcttcccaaggaaaacaagtcagagtcaagttatatcatgggttagaatgtccttgctgtctaatgctccccttattagactacttttttaataaaattaagagtacccacggatagcatcattcatctgggaaaatgccaataagtgattgtcagtggctacctttcagttttctgttagattcccctttatatataagagacatgcttgataaggttgacatgttaaaaaggcttaagaagtttcttaaaattcttgtaattcagagtttaagaccagtctgctagttaaagacaatcattgataataattggctgaaataaatggctcttgcagagaccctgagttcagttctcagccctcaagtcagcagttcacaactacttgtaaccattattataatgaacccataagcacccacatgtaagtgccatatacccagagactttttttgagataggatttctcttgtagaccaggctggccttgaactcagtgttgggattgaaagcgtgtgccaccactaccaccacctgactaaattattttttaaaaaacatatattaagcttgctttgttttttgtatttttttgtaattagaagttgttttattatagaatttaatgccagttcttgatcctcaaagggtgacacaggaaaattgggagttgaagaccagcctgggtataatagctagggatacatatagttcagtagtagggaacttgcctagtgtatacttagagaaatctgtgtgtgtgtggctgtggttggtgtgaggaaacgtggatctatcatcaaacttactttgtaatctgtatatagccttgaccaacccttcctcacatccctctcagctctgggattataataaccatgtagcacagaagcctaaggagaaagcaaaatgcttctttcttgttggtgtttttgagatgctcacactggctcgccaggatctccttgatcttcctgtctcccattctcagttgggattacagttatcttgtttctctcagctagaaatcctagacctgccttctaaaaactctatactggttataccaactttgttatatatgtaggaacttgtgccaagtgtttttgcgtttacctggatttgaatgatagattttgttacatggtgctttaatttttatgttatataaacaaagtcctggtttacgttttaggtttgtctgtgatggctgtttaaagaaaactgcacgaactaggaaagaaaataagctttctgctaaaagtaagtctcattcttagaggtaaaccttactttaaacaattacaaatagctgggcggtggtggcacaccctttaatcccagcactgggaaggaagaggctggcagatttctgagtttgcagtcagcctctgcatatatatgtgtgtgtgtgtgtgtgtgtgtgtgtatgtatatgtatatgtatatatggccaaaattgatcaattttaacaagtgttgtggtacatacctctaagctctgtacttaggaggcaggcagatctcttgagtttgaggccagcctcgtctacatagtgagcccctctttcaaaagagaaaaagagatttagctaaaataaaataatcctatagcatactgaatattgagctataaaaaaaatcactgaagttctaatatacattttctcctctatttcttcctgatttggctcatgtcataatgtgatgcacatgtaaaagtgactgactagaatcactgtaaaattaacaggcaccttctggccttacctgatactttgtattgagtgatatgatatcttactatgttgaaaaaaaaaaaaaacaaatacatcaggttagttgaacctcaatattgacagtaaaatttgagccatggtaatgttcttcctactctaacatttgtaattgtgcacaagaccttaacttggtaacttgtaacttttatatttctaggattgccatctaccagacttgggacctttctggagaatcgagtgaatgactttctgaggcgacaaaatcaccctgaatcaggagaggtcactgttcgggttgttcatgcttctgacaaaactgtggaagtgaaaccaggcatgaaagcaaggtgtctaatgatatctattttgtatttatagatctacaattgtgcacactcaattattgttgatttcaacctgaatgatttgtgatttccttttcatctgtaggtttgtagatagtggagagatggcagaatcttttccataccgaacaaaggccctgtttgcctttgaagaaattgatggtgttgacttgtgtttcttcggcatgcatgttcaagaatatggctctgactgcccccctcccaaccagaggtaggactcaatgtgaccagcttctcatgttgtgggagagggaatggcaaggggattgggttcctgtgataactggcagaaaagcacactgggcagaaacaggatggtgagtatagcatgtaccaggtcagtcctacatagaagccaaggtcgacccagatccccatagtcacacctgggatttccctatgataattacaagtaacaagagcacaggaaggaatgctgatgtctttagccatataaataataatttaatacgtgatgaaacatttttctttccttgtttttgatataggagggtatacatatcttacctcgatagtgttcatttcttccgtcctaaatgcttgcggactgcagtctatcatgaaattctaattggatatttggaatatgtcaagaaattagggtaagcttattaaaaagtgatatgttgtagaaaatgtataattatgtatttttgctttctcgtgttggttatgatacagtggagccatgaactcagtttgttagatcttctgtgatatgaagatgatatcaccatgctttaactaataaaccaattcttttgttctgttttgttgaaactattgatattattcatttggaaataaaatgttttcttgatccttttataattgtgtgtaaagactaacaacatgctgaatatgatacgtacaatcccagccgtgtagagtacaagttcatttataggttaacatgtgcagatagtccttacctaatcaattctggagagtatttgccacctaacttatagcagttccccttacacttaatttttaggatgggtttcttcccttttttgatcttaaaatacagacttgaggttttaggatcaagaaccaatttctgtaaatgaaatttacaacattcctcaatggcctttgaaaacaagtagtggtatgagaactgttagtgcatctgcttttgggtcttattgagagtaaacatttgtgtccttgtctttttgccttgttgtttaccacgtactgtgtgcagtggtttgcacctgtagcctccactactctaggaggactactgtagcgttttctaacacaaatgatatcttgatgtctttctctttgtgtttttagatacacaacagggcacatctgggcctgtccacccagtgaaggggatgactatatcttccattgccatccacctgatcagaagataccaaagcccaagcgcctgcaagaatggtacaaaaagatgcttgacaaggctgtatcagaacgtattgtccatgactacaaggtcagttggaacatagaaacatactagtctactattttctgtcttctctttgacaagtattgttcagtttttttttttttggtttttttggtttttcgagacagggtttctctgtgtagccctggctaccctggaactcactttgtagaccaggctggcctcgaactcagaaatctgtctgcctctgcctcctgagtgctgggattaaaggcatgcaccaccatgcccggctttgttcagtcttataacgtgtaactgttataattttagtttattaaagtttaattttaatacataaattttcaaatttagaaaggctgggtgttaggtgatttacatatgagcaaagtagtgcttgcctataatctcaatttggaaactgaggcaggataattcaaagttcaaaagtgtcatgggggtctggagaaatggatcagtaatttagagcacttggactcagatttgattcccagcacccagatggttactcacatccatccttgactcttaattccaggggcctctgtgagcacacatgtgcatgcagtcaaacatgtatacatataaaataaatctaatttttaataattaaatctgtcataagtaagatggtggtacatgtctttactctaagtggatagacaaaggcaggtagatctctgagtttgaggccagacttgtttatatagggagttgcaggccatcctgggctaagggacactttgtctcaaaaaagaaagaactgggtatggttcagaattcaggagactggagtagatagatctcttgagttctaaggagaccagccagcctgctttacatagtgagctctgtacatagtgaaccaagggtagatagatagtgataccctctctaaaagaaagaaggaaatacattgttataaatgagtattgtgactaaatctggcctgtgccctagagaacattttcatgtttgtcatacaatgaaagctttttaaaaacagagccaaccaggtggttgtggtacatgtgcccgccttcagtcccagcactcaggaaggacaggcagatctctctgagtttgaggccagcctggtctatagagttccaggaaagccagggcaatatagagaaaccctgtctcaaaaaataaatagagctgggcatggtggcacacgcctttaatcccagcacttgggaggcagaggcaggcagatttctgagttcgaggccagcctggtctacagagtaagttccaggatagccaggactacacagagaaaccctgtctcgaaaaaaaaacaaacaaaaaacagatagatagatagatagatagatagatagatagatagatagatagatgattaaaaagaaagcatagaaattcctaatcaggggctggagagatggctcagtggttaagagcactgactgctcttccgaggtcctgagttcaattcccagcaaacaaacggtggctcacaaccatctgtaatgggaggatcctgataccttcttctggtttctgaagacagctacagagtacttacagacataaataaacctttataaataaaaaaaaaattctaatcatgggaatttttttacaggatattttaaaacaagctactgaagatcgattaacaagtgcaaaggaactaccctactttgaaggtgatttctggcccaatgttctagaagaaagcatcaaggagcttgaacaggaagaggaagagaggaaacgggaagagaacaccagcaacgagagtactgatgtaagggctttctgtgtctgcagtgtctaccttgacacctcactgacaatacagaaaggagtttacactctcaatttggtgtaaaatttaaattctgctaagtgtaatgggcttcatttcagcactaagggtcccagacttcaaggccaaccttggctttatagcagccaaactatcttagaacgaagaggctctgtatttctaagtagtatcctggatattgagcaatataagttcctggaaaactgtacagaaaaatacatctaataggccaaattatagctactacaggcatatgctctctagtttattttcccagaagtgctgagcatcacaggcagacaaaagcctggaacagagttaacttgtctccttcatagtatcctggtcagttactgaccagacacatcttgactgttctctggatttcagcttaataaaacgggggcaggttagaaggagtgacacacacctttttatttcagcactcaggaggcagaagtaggcagatacacattgagttccaatgccagacttctatatagtgaaaccttgtccaaaaagaaggggaaaaaaaaggctggagcacttggccaccaaacccagaattcattccctaaacccacatggttgaagcagagaatcagcctcccataagttgtcctttggcctctacaggtgtgtgccatggtatgcacaaatacaagggccctagatgactaagtttggctccaggaccttttaaggcaagcatggcagtgcccatccgtaatctcaagttctctgtgtttctccctctccctcccctcccccactccaccccaccccttatttaccagatttatcctttgggtaacttcatgactgaataggtgagagtgtttggtagcttgctggtttccctcttcctttccttggtcaccggccatggtgccactcattcttcagtcttgtctgtatctgacctctttagtcaatggcttctgcacactggggcttttctgttttttcttcttgttttttgttttgttttctaaagaccgtttccctgtgtagccgtggctttcctgggactcactctatagaccaggctggcctttacctcagagatctgccagcctctgtttcttgagtgctgggattaaattcatcggtccccagtgcccagcaaattgagacttcttctaaaaatacaagtttacaagctttcatttccataatgaagcttggggtctttgttggcaggcaacttagaaaggcttcagagtacttgatgttcttcaaaaggaacccagttcagttcttttccctgtacccaaaacaacatctcttaactttctgtaactccagttttgttatcagagagagaacctgcacacagatggcatacattcatcaagctacacagataaacaaaaaaaaaatagttaagcatttgcttgcaagttaaagaaagaaagaaggaaggaagtaaggagagagagagagagagagagagagagagagagagagagagagagagaaaagaaacattaaaaggaaaatagtgagtgatgagtaactgcagaaaataataataataaaaagaattctcggtcaagagttaaagagagacttcagcctcatatccagatcaatcctaacaacctagccttttcatttctcctctgtgctgccctacaggtaacaaaaggagacagcaaaaatgctaagaagaagaataacaagaaaaccagcaaaaacaagagcagcctgagtaggggcaataagaagaagcctggtatgcccaatgtgtctaatgacctttctcagaaactgtatgccaccatggaaaagcataaagaggtgagaggcagccaccagggtggaaggatgtggcaggtggggttctaagctgctcacccaactggcatgatgaaaactccaggttgctggaaattcagagggaagaaatgatttgactggaagagggttgactgagatgaagagaatatgcatatagagtttgcttatgaaaaatgttctttgaggctgttctaaatttacatggtgttgcattgtgtcttaaaggataagcattgtttatctagtcctgttgataaatttgcttgggtttctgacgtttttaaggcagggtcttattctgtaaccccctgggtggccttgaattcatagagggccacctgcctctgtcttcctagttctgagatcaatatcctgttccaacgctttttcagatttgctcttcaaatgttgtatgttacttagagccccactctcatcccagtttgtaagtgcttagcgttagacttaagactgactccgaaacattcataatcatattaaaccctctaaatgacaagttagttagtgttcctcacatggcttgcttatttatttatttattaagttttatgtgtatgggtattttgcttgcatgccagaaaaggatgccaaatactctgcaactgggttaaagacagccaccatgaaggtattggggatggaacttcggtcctctacaaaagcaactagtgacaaagagcaacacctgagcaaaccatgataaggaagaagggaatattttgttgtttttgagatcgttttatgatgtggctggtctttgcttactgtgtagctaaggacagtcttacatgcctagtctaatcatacctaggaccaggctcccgagctcagctatatccctaggccatgtgtggttttttgttttggttgggagggggggtatttatttattttggtttttcgagacagggtttctctgtaaccctggctgtcctgaaactcattctgtagattggtctggcctcgaactcagaaacctgccagcctctgcctcccaagtgctgggattaaaggcgtgcaccatcactgcccatgcaccaccactgcccagctctgtgttctttttcttatcacagttcagctctattctaagatgaaataatagcctttttatttttattttttgggttttttttttttgtttttcttaaaaagatttatttattttatttatatgagtacactgtagccgtcttcagacacaccagaagagggcctcagatcctattgcagatggttgtgagccaccatgtgtttgatgggaattgaacttgggacctctggaagagcagtcaatgctcctaaccactgagctatctctacagcccttttttttattttatatttattttgctctacaagaagtggtttctctgtcctgtaacagccctagttatcactttgtaggttaccagagatccctctgcctcccaagtaaaggcatgaaccgccacgcccagtttcataaggaatttcttaaacttaacagttatgttgtgagaagactgatgacttaatttttgtaattaggttagttagccatctctagaaaagacagtatggtgagggaagtacaaatactcaaagcatttttcccccatatttttcctctctagttctaacagattgatacaaccaaagctagatagatgcccaatgccatctcttcacccatgcccctggcatggaaggtcctcctgcattctaatggataccactatcagaaaatattactaatagccttgcccaatgttgagagtgtagtactgcttgaagagctaatagtgattgatttgactgagtttttgttttttatgtacatttggtgttgggcctacatgaatgtctgtatgagagtggctggtccactagaatttgaaatttgagttacaggctgttctgagctgccatgtgtgtactgggtattgaacccaggtcctctggaagagcagccagtgctccgacaaccactgtgtctgtgtgtctgtgtgtgtgtgtgtgcgcgtgcgtgcgtgcgcgcgcgcgggcaccacatgcatcaggtgctcatagttccagcagaggggatagagaactggtgtaacagacatgggacgttcgtgtggctgttggggcttgacctctggtcctcttaatcactgaaccatctctccagccctttatttgacttaatttatcaaatcttaggctatcctgcgaatggaaaaccaatggtggatgccccatttgcaagcagcttaggttatctatctcagactttggagatgcatttcaagttcatgactaggattttatgccaattcatacaaattttcaacctctccaaaactggccaagagtagagggtctggggaaagggcacacacttggtgcagactcaagtaagcaaagcactcatgcacagaaagaggaaaatacatgcacatacatatgtgtatcggaaaggtatgtggactttgtgtgccattggcttattgtctgagaaaaacatccaaactgattatgattttgttgcatgtgtttgtttacagcagacctctatacaggttttacaggatgtctccacttagattaattgtatactttctagtacttagattcaggttaagccacagactgcatcttaaagtatactaatcactgcacatgttctgtccctgagctggtctgtggtttgcttttgtttgtttttttccttgaagttttactgaaatgaagtaacaggatatgagggggaggcattgtttatttttttcaagattgtgtttctttatgtagcagccatggctatcctggaactttcttcatagaccaggctagcctcaaactcctgctccctgagtgctgtgatcaaagatgtgagccacttactatacctggcctgagttttagatttttttttttaaagactttaagatttatttattttatgtatatgagtacactgtagctgtacaaatggttcatctgtgagccatcatatggttgctgggaattaaactcaggacctctgctcattctggccctgctcactctgacccctgccagagagcccaaagatttatttattactgtatataagtacactgtagctgtcttcagacaccagaagagggcatcagatctcattacaggtggttgtgagatctttaaagtctcagaatgaacaaggatgaagggcttcaactaacccttctgtgctctcctctcttctcctcaggtgcctttctattgcagtggcattgcagttcgaaagtcacaatgagcttttcttttggcaggttttctttgtgatccgcctcatcgcttgtcctgctcccaattccctgcctcccattgttgatcctgaccctctcatcccctgtgacctgatggacggtagagatgcatttctcacccttgcaagggacaagcacctggagttctcttcacttcgaagagcccagtggtctaccatgtgcatgctggtggagctccatacacagagtcaggatcgctttgtctacacctgcaacgagtgcaagcaccacgtggagacacgctggcattgcactgtgtgtgaggtaggcactacatgtgggaaggtccccattgtgtgagctgtgatgtaaacatgtgttacaaacctctgccctcttgttgggaaggacagaactgaagagattggttgtgttttataaagggagcttttattcacttttgcagagttgacctgcatcttctggtttttttcttctccttcaggattatgacctgtgcatcacttgttataacactaaaaatcatgaccacaaaatggagaaactaggccttggcttagatgatgagagcaataaccagcaagctgcagctacacagagcccaggagactcccgccgcctgagcatccaacgctgcatccagtctctggtgcatgcctgtcagtgccgcaacgccaactgctccctgccttcctgccagaagatgaagagggttgtgcagcacaccaaaggctgcaaacggaaaaccaatggtgggtgccccatttgcaaacagcttattgccctctgctgctatcatgccaagcactgccaggagaacaagtgcccggtgccattttgcctcaacatcaagcaaaagctccggcagcaacagctgcagcaccggctccaacaggctcagatgctccgtaggaggatggccagcatgcaacgaactggtgtggcggggcagcagcagggcctgccgtccccaactcctgctacaccaactacccctactggccaacagccagccaccccacagacaccccagccccaacccacctctcaaccacagcccactcctcccaacaacatgacaccctacttacccaggactcagactactggccctgtgtcccagggtaaggcaccaggccaggtgaccccacctaccccacctcagactgctcaggccccccttccagggcctccacctgcagcagtagaaatggcaatgcaaattcagagggcagcagagacacagcgccagatggcccatgtacagattttccaaaggccaatccagcaccagatgccccagatgtcacccatggcccctatgggcatgaacccacctcctatggccagaggtcctggtgggcatttggatccaggaataggtccagcaggaatgcagcaacagccaccttgggcccaaggaggaatgcctcagccccagcagatgcagtcagggatgccaaggccagccatgatgtcagtggcccagcatggtcagcctttaaacatggctccacaaccaggattgggccaagtgggtgtgagccctctcaagccaggcactgtgtctcaacaagccttacaaaaccttttgcggactctcaggtctcccagttctcccttacagcagcaacaggtgcttagtatccttcatgccaacccccaactgttggctgcattcatcaagcagcgggctgccaagtatgccaaccctaatccacagcctctccctggacagcctggcatgacccagggacagccagggctgcagccacctaccatgcctggccagcaaggtgtccactccaacccagccttgcagaacatgaatcctctgcaggcaggtgtccagagagctggcctgccccagcagcagccgcagcagcagctccagccacccatgggagcaatgagtccccaagctcagcaaatgaacatgaatcacaataccatgccttcacagttcagagacatcttaagacggcagatgatgcaacagcagggagcagggccaggaatcggccctggaatggccaaccagttccagcagccccaaggaattggctatccaccgcagcagcagcagcagcagcgaatgcagcatcacatgcagcaaatgcagcaaggaaatatgggacaaatgggtcagcttccccaggctctgggggctgaggcaggagccagtctacaggcctatcagcagcgacttcttcaacaacagatggggtctcctgctcagcccaaccctatgagcccacagcagcacatgctcccaaatcaggcacagtccccacacctacaaggtcaacaaatccctaattctctctccaatcaagtgcgctctccccagcctgtcccttctcctcgaccacagtctcagcccccccattccagcccatctccgaggatgcagcctcagccttctccacaccatgtttctccacagaccagttccccacatcctggactggtagctgcccaggctgccaaccctatggaacaagggcattttgccagcccagaccagaattcaatgctttcacagctcgctagcaatcctggcatggcaaacctccacggggcaagtgccacggacctgggactgagcagcgataatgcagacttgaattcaaacctctcacagagtacactagacatacactagagacaccttgtagtattttggaagcaaaagattattttctcttaacaagactttttgtactgaaaacaatttttttgaatctttcttagcctaaaagacccattttccttggaacatgtaagaactgtgcagtagccatttatggtttaaagtaaacaggccagatgaacctgagggataatagattacaaagaatatatttttgttatggctggttaccccagctctttttccccttgtgtgtgtggttcaagtgtgcactgggaggcaactgaggtctgaagccaaccatatgctcctgccttgccgataggttttattattttttttaaattaatgaaaatatgtaatattaatagttattatttactggtgcagatggttgacatttttccctattttcctcactttatgaaagaatttaaataaaaaaaaagaacatttctaaaaccagaggacaaaaggggttaatgttacgtaaaattacattatatatatatatatatataaatatatataaatatattaaaataccaatttttttctctgggtgcaaagatgttcattcttttaaaaacatttaaaaaataaaataaaaagcctcctctttccatccctcaagtcaacttttgtgctccagaaaattttctattctgtaagtctaagggtaaaacttcaagtattaagataatttgtacatgta

SEQ ID NO: 161 - DNA, 8197 bp, Mus musculus
aggaggtgagtgtctctggtcgcctcctcctctccccctttttcgcccccgcctccttgtggcgatgagaaggaggaggacagcgccgaggaggaagaagctgatggcggcggcggagctccgagagacctcggctgggcaggggctcgccgtggcgggctggggactgcgtctgtagagctgtgagttcccgagaattcgctgcagcggacgtgctcgtgggatcagtgttgctgtaccctcctcccggcctggtttaggcccggcccctcgcacttgcccctaccatttctgttgagtccgcatccctctccggccaccgcaaccaggcgaagagaaaaaggaacttccccccacccctgttgggtggcggcggagctccggagcccacccttaggagcggggcggggaccccgtttcggagaagagatttcctcaggattctcgtttttttcctcggttgtatctccgaaagaattaaaaatggccgagaatgtggtggaacccgggccgccttcagccaagcggcctaaactctcatctccggccctctcggcgtccgccagcgatggcacagattttggttcactgtttgacctggaacatgacttaccagatgaattaatcaactctacagaattgggactaaccaatggtggcgatatcagtcagcttcagacaagtcttggcatagtacaagatgcagcctcgaaacataaacagctgtcagaactgctgaggtctggtagctccccaaacctcaacatgggagtcggtggcccaggccaagcgatggccagccaggcccaacagaacagccctggattaagtttgataaatagcatggtcaaaagcccaatggcacagacaggcttgacttctccaaacatggggattggcagtagtggaccaaatcagggtcctactcagtccccagcaggtatgatgaacagtccagtgaaccagcctgccatgggaatgaacacagggatgaatgctggcatgaatcctggaatgttggctgcaggcaatggacaagggataatgcccaatcaagtcatgaacggttccattggagcaggccggggacggccaaacatgcagtacccaaatgcaggcatgggcaatgctggcagtttattgactgagccactacagcagggctctcctcagatgggaggacagccaggattgagaggcccccaaccacttaagatgggaatgatgaacaatcccagtccttatggttcaccatacactcagaattctggacagcagattggagcaagtggccttggtctccaaattcagacaaagactgttctaccaaataacttatctccatttgcaatggacaaaaaggcagttcctggtgggggaatgcccagtatgggccagcagcctaccccatcggtccagcagccaggcctggtgactccagttgccgcaggaatgggttctggagcacacacagctgatccagagaagcgcaagctcatccagcagcagcttgttctccttttacatgctcacaagtgccagcgccgggagcaagctaatggggaagtgaggcagtgcaaccttcctcactgtcgtaccatgaaaaatgtcctaaaccatatgacacattgccagtcaggcaaatcctgccaagcaattttgactggagcaccagttgggcttggaaaccctagctctctaggagtggggcagcagtccactcctagcctaagcactgttagtcagattgaccccagctctatagagcgagcttacgctgctcttggactaccctatcaagtaaaccagattccaccacaaccccaggtacaagcaaagaatcaacaaagccagccatctggacagtctccccagggcatgcggtctgtgaacaacatgagtgctagtcctatgggtgtaaatggaggtgttggggttcagacgccaaatcttctttctgactccatgttgcattcaactataaattctcaaaacccaatgatgagtgaaaatgctggtgtggcctccctgggtcctttgccaacagcagctcagccatctagtactggaattcgaaaacagtggcatgaagatattactcaggatcttcgaaaccaccttgttcataaacttgttcaagccatatttcccactccggatcctgctgctttaaaagaccgacggatggaaaatcttgttgcatatgctcgtaaagtggaaggggacatgtatgaatctgcaaacaatagagcggaatactatcacctcctagccgagaagatctataagatccagaaggaactagaagagaaacgaaggactagactacagaaacagaacatgctaccgaatgctcctggcatgggtccagttcctatgaatactgggtcgaacatggggcagcaaccaacaggaatgactaccaatggtcctgtacctgacccgtctatgatccgtggcagtgtgccgaaccacatgatgcctcggatgactccacagcctggtttgaatcaatttgggcagatgaatatgccacagccccctattggaccccggcaaccctctcctcttcagcaccatggacaattggctcagtctgggtcactcaatccgcctatgggctatggacctcgcatgcagcaggcttccggccagaaccagttcctctcccagactcagttcacatcccaaggaatgaatgtaacaaacatgcctttggctccatccagcggtcaagcaccagtgtctcaagcacaaatgtccagttcttcttgcccagtgaactctcctataatgcctccagggtctcaagggagccacattcactgtcctactctgcctcaacaagctcatcagaattcaccttctcctgttcctagccgcacccctactcctcatcatacccccccaagcatagggaatcaaccaccaccagcaacagcaattccaacacctgttcctacacctcctgccataccacctggaccacagcccccatctctgcatccctcatctagacaaacacctacaccaccaacacatctgcctccccaagtgcagccttcacttcctgctgctccttctgctgaccagtcccagcaacagcctcggtcacagcagagcacagcagtttctgttcctaccccaacagcaccattgctgcctcctcagccttccactccgctttctcagccagctgtgagcattgaaggccaggtctcaaaccctccatctactagtagcaccgaagtgaattctcagaccattcctgagaagcagccttcacaggaagtgaaaatggagtctaaaatggaggtggataagccagaaccagcagatgctcaacctgaggatacaaaggaggctaaaggtgaggatgttaaagtagaacctacagaaatggaggagagaggccctgagttaaaaactgatgggaaagaggaggaagaacagccaagcacctctgctacccagtcctccccagctcctggacagtcaaagaagaagattttcaaaccagaggaattacgacaggctctgatgccaacattggaggcactttaccggcaggacccagaatctcttccctttcgtcagcctgtggacccgcagcttctaggaatccctgattactttgatattgtgaagagccccatggatctttctacaatcaagaggaagttagatactggacaataccaagagccctggcaatatatagatgatatttggcttatgttcaacaatgcctggttatataaccgtaaaacttcaagggtatacaaatattgctctaaactttctgaagtatttgaacaagaaattgaccctgtcatgcaaagccttggatactgttgtggcagaaagttggagttttctccacagactctttgttgctatgggaaacagttatgcacaatcccccgtgatgctacttactacagttaccagaacaggtatcatttctgtgagaagtgtttcaatgaaatccaaggggagagcgtttctttgggtgatgacccttcccaacctcaaactacaataaataaagaacagttttccaagagaaaaaatgacacgttggatcctgaactgtttgttgagtgcacagagtgtggaagaaagatgcaccagatctgtgtccttcaccacgagatcatctggccatctgggtttgtctgtgatggctgtttaaagaaaactgcacgaactaggaaagaaaataagctttctgctaaaagattgccatctaccagacttgggacctttctggagaatcgagtgaatgactttctgaggcgacaaaatcaccctgaatcaggagaggtcactgttcgggttgttcatgcttctgacaaaactgtggaagtgaaaccaggcatgaaagcaaggtttgtagatagtggagagatggcagaatcttttccataccgaacaaaggccctgtttgcctttgaagaaattgatggtgttgacttgtgtttcttcggcatgcatgttcaagaatatggctctgactgcccccctcccaaccagagatacacaacagggcacatctgggcctgtccacccagtgaaggggatgactatatcttccattgccatccacctgatcagaagataccaaagcccaagcgcctgcaagaatggtacaaaaagatgcttgacaaggctgtatcagaacgtattgtccatgactacaaggatattttaaaacaagctactgaagatcgattaacaagtgcaaaggaactaccctactttgaaggtgatttctggcccaatgttctagaagaaagcatcaaggagcttgaacaggaagaggaagagaggaaacgggaagagaacaccagcaacgagagtactgatgtaacaaaaggagacagcaaaaatgctaagaagaagaataacaagaaaaccagcaaaaacaagagcagcctgagtaggggcaataagaagaagcctggtatgcccaatgtgtctaatgacctttctcagaaactgtatgccaccatggaaaagcataaagaggttttctttgtgatccgcctcatcgcttgtcctgctcccaattccctgcctcccattgttgatcctgaccctctcatcccctgtgacctgatggacggtagagatgcatttctcacccttgcaagggacaagcacctggagttctcttcacttcgaagagcccagtggtctaccatgtgcatgctggtggagctccatacacagagtcaggatcgctttgtctacacctgcaacgagtgcaagcaccacgtggagacacgctggcattgcactgtgtgtgaggattatgacctgtgcatcacttgttataacactaaaaatcatgaccacaaaatggagaaactaggccttggcttagatgatgagagcaataaccagcaagctgcagctacacagagcccaggagactcccgccgcctgagcatccaacgctgcatccagtctctggtgcatgcctgtcagtgccgcaacgccaactgctccctgccttcctgccagaagatgaagagggttgtgcagcacaccaaaggctgcaaacggaaaaccaatggtgggtgccccatttgcaaacagcttattgccctctgctgctatcatgccaagcactgccaggagaacaagtgcccggtgccattttgcctcaacatcaagcaaaagctccggcagcaacagctgcagcaccggctccaacaggctcagatgctccgtaggaggatggccagcatgcaacgaactggtgtggcggggcagcagcagggcctgccgtccccaactcctgctacaccaactacccctactggccaacagccagccaccccacagacaccccagccccaacccacctctcaaccacagcccactcctcccaacaacatgacaccctacttacccaggactcagactactggccctgtgtcccagggtaaggcaccaggccaggtgaccccacctaccccacctcagactgctcaggccccccttccagggcctccacctgcagcagtagaaatggcaatgcaaattcagagggcagcagagacacagcgccagatggcccatgtacagattttccaaaggccaatccagcaccagatgccccagatgtcacccatggcccctatgggcatgaacccacctcctatggccagaggtcctggtgggcatttggatccaggaataggtccagcaggaatgcagcaacagccaccttgggcccaaggaggaatgcctcagccccagcagatgcagtcagggatgccaaggccagccatgatgtcagtggcccagcatggtcagcctttaaacatggctccacaaccaggattgggccaagtgggtgtgagccctctcaagccaggcactgtgtctcaacaagccttacaaaaccttttgcggactctcaggtctcccagttctcccttacagcagcaacaggtgcttagtatccttcatgccaacccccaactgttggctgcattcatcaagcagcgggctgccaagtatgccaaccctaatccacagcctctccctggacagcctggcatgacccagggacagccagggctgcagccacctaccatgcctggccagcaaggtgtccactccaacccagccttgcagaacatgaatcctctgcaggcaggtgtccagagagctggcctgccccagcagcagccgcagcagcagctccagccacccatgggagcaatgagtccccaagctcagcaaatgaacatgaatcacaataccatgccttcacagttcagagacatcttaagacggcagatgatgcaacagcagggagcagggccaggaatcggccctggaatggccaaccagttccagcagccccaaggaattggctatccaccgcagcagcagcagcagcagcgaatgcagcatcacatgcagcaaatgcagcaaggaaatatgggacaaatgggtcagcttccccaggctctgggggctgaggcaggagccagtctacaggcctatcagcagcgacttcttcaacaacagatggggtctcctgctcagcccaaccctatgagcccacagcagcacatgctcccaaatcaggcacagtccccacacctacaaggtcaacaaatccctaattctctctccaatcaagtgcgctctccccagcctgtcccttctcctcgaccacagtctcagcccccccattccagcccatctccgaggatgcagcctcagccttctccacaccatgtttctccacagaccagttccccacatcctggactggtagctgcccaggctgccaaccctatggaacaagggcattttgccagcccagaccagaattcaatgctttcacagctcgctagcaatcctggcatggcaaacctccacggggcaagtgccacggacctgggactgagcagcgataatgcagacttgaattcaaacctctcacagagtacactagacatacactagagacaccttgtagtattttggaagcaaaagattattttctcttaacaagactttttgtactgaaaacaatttttttgaatctttcttagcctaaaagacccattttccttggaacatgtaagaactgtgcagtagccatttatggtttaaagtaaacaggccagatgaacctgagggataatagattacaaagaatatatttttgttatggctggttaccccagctctttttccccttgtgtgtgtggttcaagtgtgcactgggaggcaactgaggtctgaagccaaccatatgctcctgccttgccgataggttttattattttttttaaattaatgaaaatatgtaatattaatagttattatttactggtgcagatggttgacatttttccctattttcctcactttatgaaagaatttaaataaaaaaaaagaacatttctaaaaccagaggacaaaaggggttaatgttacgtaaaattacattatatatatatatatatataaatatatataaatatattaaaataccaatttttttctctgggtgcaaagatgttcattcttttaaaaacatttaaaaaataaaataaaaagcctcctctttccatccctcaagtcaacttttgtgctccagaaaattttctattctgtaagtctaagggtaaaacttcaagtattaagataatttgtacatgta

SEQ ID NO: 162 - protein, 2324 aa, Mus musculus
MAENVVEPGPPSAKRPKLSSPALSASASDGTDFGSLFDLEHDLPDELINSTELGLTNGGDISQLQTSLGIVQDAASKHKQLSELLRSGSSPNLNMGVGGPGQAMASQAQQNSPGLSLINSMVKSPMAQTGLTSPNMGIGSSGPNQGPTQSPAGMMNSPVNQPAMGMNTGMNAGMNPGMLAAGNGQGIMPNQVMNGSIGAGRGRPNMQYPNAGMGNAGSLLTEPLQQGSPQMGGQPGLRGPQPLKMGMMNNPSPYGSPYTQNSGQQIGASGLGLQIQTKTVLPNNLSPFAMDKKAVPGGGMPSMGQQPTPSVQQPGLVTPVAAGMGSGAHTADPEKRKLIQQQLVLLLHAHKCQRREQANGEVRQCNLPHCRTMKNVLNHMTHCQSGKSCQAILTGAPVGLGNPSSLGVGQQSTPSLSTVSQIDPSSIERAYAALGLPYQVNQIPPQPQVQAKNQQSQPSGQSPQGMRSVNNMSDMGVNGGVGVQTPNLLSDSMLHSTINSQNPMMSENAGVASLGPLPTAAQPSSTGIRKQWHEDITQDLRNHLVHKLVQAIFPTPDPAALKDRRMENLVAYARKVEGDMYESANNRAEYYHLLAEKIYKIQKELEEKRRTRLQKQNMLPNAPGMGPVPMNTGSNMGQQPTGMTTNGPVPDPSMIRGSVPNHMMPRMTPQPQQFGQMNMPQPPIGPRQPSPLQHHGQLAQSGSLNPPMGYGPRMQQASGQNQFLSQTQFTSQGMNVTNMPLAPSSGQAPVSQAQMSSSSCPVNSPIMPPGSQGSHIHCPTLPQQAHQNSPSPVPSRTPTPHHTPPSIGNQPPPATAIPTPVPTPPAIPPGPQPPSLHPSSRQTPTPPTHLPPQVQPSLPAAPSADQSQQQPRSQQSTAVSVPTPTAPLLPPQPSTPLSQPAVSIEGQVSNPPSTSSTEVNSQTIPEKQPSQEVKMESKMEVDKPEPADAQPEDTKEAKGEDVKVEPTEMEERGPELKTDGKEEEEQPSTSATQSSPAPGQSKKKIFKPEELRQALMPTLEALYRQDPESLPFRQPVDPQLLGIPDYFDIVKSPMDLSTIKRKLDTGQYQEPWQYIDDIWLMFNNAWLYNRKTSRVYKYCSKLSEVFEQEIDPVMQSLGYCCGRKLEFSPQTLCCYGKQLCTIPRDATYYSYQNRYHFCEKCFNEIQGESVSLGDDPSQPQTTINKEQFSKRKNDTLDPELFVECTECGRKMHQICVLHHEIIWPSGFVCDGCLKKTARTRKENKLSAKRLPSTRLGTFLENRVNDFLRRQNHPESGEVTVRVVHASDKTVEVKPGMKARFVDSGEMAESFPYRTKALFAFEEIDGVDLCFFGMHVQEYGSDCPPPNQRYTTGHIWACPPSEGDDYIFHCHPPDQKIPKPKRLQEWYKKMLDKAVSIVHDYKDILKQATEDRLTSAKELPYFEGDFWPNVLEESIKELEQEEEERKREENTSNESTDVTKGDSKNAKKKNNKKTSKNKSSLSRGNKKKPGMPNVSNDLSQKLYATMEKHKEVFFVIRLIACPAPNSLPPIVDPDPLIPCDLMDGRDAFLTLARDKHLEFSSLRRAQWSTMCMLVELHTQSQDRFVYTCNECKHHVETRWHCTVCEDYDLCITCYNTKNHDHKMEKLGLGLDDESNNQQAAATQSPGDSRRLSIQRCIQSLVHACQCRNANCSLPSCQKMKRVVQHTKGCKRKTNGGCPICKQLIALCCYHAKHCQENKCPVPFCLNIKQKLRQQQLQHRLQQAQMLRRRMASMQRTGVAGQQQGLPSPTPATPTTPTGQQPATPQTPQPQPTSQPQPTPPNNMTPYLPRTQTTGPVSQGKAPGQVTPPTPPQTAQAPLPGPPPAAVEMAMQIQRAAETQRQMAHVQIFQRPIQHQMPQMSPMAPMGMNPPPMRPGGHLDPGIGPAGMQQQPPWAQGGMPQPQQMQSGMPRPAMMSVAQHGQPLNMAPQPGLGQVGVSPLKPGTVSQQALQNLLRTLRSPSSPLQQQQVLSILHANPQLLAAFIKQRAAKYANPNPQPLPGQPGMTQGQPGLQPPTMPGQQGVHSNPALQNMNPLQAGVQRAGLPQQQPQQQLQPPMGAMSPQAQQMNMNHNTMPSQFRDILRRQMMQQQGAGPGIGPGMANQFQQPQGIGYPPQQQQQQRMQHHMQQMQQGNMGQMGQLPQALGAEAGASLQAYQQRLLQQQMGSPAQPNPMSPQQHMLPNQAQSPHLQGQQIPNSLSNQVRSPQPVPSPRPQSQPPHSSPSPRMQPQPSPHHVSPQTSSPHPGLVAAQAANPMEQGHFDDQNSMLSQLNPGMANLHGASATDLGLSSDNADLNSNLSQSTLDIH

SEQ ID NO: 163 - DNA, 88225 bp, Homo sapiens
tcttgtttgtgtgctaggctgggggggagagagggcgagagagagcgggcgagagtgggcaagcaggacgccgggctgagtgctaactgcgggagccagagagtgcggaggggagtcgggtcggagagaggcggcaggggccgagacagtggcagggggcccggggcgcacgggctgaggcgacccccagccccctcccgtccgcacacacccccaccgcggtccagcagccgggccggcgtcgacgcctaggggggaccattacataaccccgcgccccgcggcgtcttctcccgccgccgcgggcggccccgaacggagccccggggggcgggcgctcccagcacctggccgccggcggtgggggccgtagcagcggccgtatttatttattttccgcgggaaaggaaggcgaaggaggggagcgcggcgcgaggaggggccgcctgcgccgccgccggagcggggcctcctcggtgggctccgcgtcggcgcgggcgtgcgggcggcgctgctcggcccggccccctcggccctctggtccggccagctccgctcccggcgtccttgccgcgcctccgccggccgccgcgcgatgtgaggcggcggcgccagcctggctctcggctcgggcgagttctctgcggccattaggggccggtgcggcggcggcggcgcggagcgcggcggcaggaggagggttcggagggtgggggcgcaggcccgggagggggcaccgggaggaggtgagtgtctcttgtcgcctcctcctctccccccttttcgcccccgcctccttgtggcgatgagaaggaggaggacagcgccgaggaggaagaggttgatggcggcggcggagctccgagagacctcggctgggcaggggccggccgtggcgggccggggactgcgcctctagagccgcgagttctcgggaattcgccgcagcggacgcgctcggcgaatttgtgctcttgtgccctcctccgggcttgggcccaggcccggcccctcgcacttgcccttaccttttctatcgagtccgcatccctctccagccactgcgacccggcgaagagaaaaaggaacttcccccaccccctcgggtgccgtcggagccccccagcccacccctgggtgcggcgcggggaccccgggccgaagaagagatttcctgaggattctggttttcctcgcttgtatctccgaaagaattaaaaatggccgagaatgtggtggaaccggggccgccttcagccaagcggcctaaactctcatctccggccctctcggcgtccgccagcgatggcacaggttagtttcggcagccccggccttccacgttccctttaatcttttctactcggtgcgcctttattcttccattttttttttcttcctctctctctagttccctgccccttaattaattttaaaggtatttgaatgagctggtcgaagacgtccagtagcccaaccattttctttgcctcctaatacattgattgcaacactatgtcatatcggtgtgtgttctggaattagagctcgtaagtgggtgctatatagaaatggcctgtattgttgctctcatgcaatttaatttgggaaatgccaatgcatttgtgtgtaagagctcctatgcaatttaagtttcattttttttgttcttggcaaatgaatttcgaatcctttctccttactgtacttactgtgtttcctctactttccactcttcgaaattttctctcctttgcagaatattttctgttgaggaatagggtgtaaaaaaatcttgattttgtgtgtgcgaggtccaagatttcaggttagaggtgaagtttaacaattcttttatcttacctaccattcttagcttttttttcctttttcttcttatttgctttaagaatcaatatggagcgcagttcatttcacatctcccagttctttggtgtgagaccaaaatgtctgaaactctgggtttttaggttgggagaacaggggcatgttctttgcagtttgcagtcactttctcattttaggggaaataagataaacaattttgtggagttacgtacctggaaatcaaggttagaagttgaaagagttccaatcatgaactacaaacatgaactgattgtacaaaagtttaaaatgtgcattaggtttggtgtttgtgtgtgtctttgtctttttacacttttaaacatacttggagatcaagattttcgtttaaaagctttacgaccagttcattcagttgtggactagctcctttgtcaggagaagttcagggagacttcttccatcatcccttcattcttttcttacagttagtttaatggtgttatcctgatgggtaaggaccttttctttgctgggataatgaagatgaagaatggctggccatctgacagtccacaagatgttcccctttactacggagcatctctttaactccctgagagcaggctcagcgtcatccctccatctgccagtgagagtgcataatggagttaaatgtaccctttgagtttgtagagaacttcgagagcatgtttctaaataggcttcatttcagagggtgaaaatgggaagacagagctaatgctttgaattcgttgcttttataagaaagatgtgaaatgaatttaagttaacctgcaaaaattgagaagtaggaatcttgcgagttcctctacctaaggcttgtaacattgattatgcatgaactttgatctgtacctattctatgaaggtactgtagtctccagggatttttttagctggttttttccttcagaattcatacacatacacaaacgtcgttgtattcctttgcacctactaaagtgccattcagaaacattttttagatcatctttagagacttaatcacctgtagatttttgtggtgtttctttcgtatttgtgtaatgtggtagtttttgctttttagttttggtgtaacgtggtagtcgattttacattggagttagccagtgacttggaacgtaggggaaacttttttgtgtactttgagtagtcctgatttgagcagtttcgtcttggagctgtattgtttaaatacttctgttcaggtgtgctactactttctccatgtcggtctgttttgctacttgaaatatctttgaataattacaagagttttaaatgtgttaagtgggcttttatagtttaaaaaaaaactcaacattgagattaattcattcactcataatgctaagagtttatcttagttacttttctaaattttgtaatgagggttaactttacccccctccccaaatcaagattctactccaggaattctttggtgtacggtttttaattgtaaccagtctgggtttgggggaggggagaagtgagtataaagaaaatactgtccctctgttaacttacttcaagttgggtaccattgtaattttttttttttttttttttttttttgagatggagtctcattctgtcacccaggctggagtgcagtggtgcgatctcactacaacctctgcctcctgggttaaagcagttctgtctcagcctccctagtagctaggactacaggcgcagaccaccacgcctggctgatttttgtatttttagttgagacaggatttcaccatattggtcaggctggtctcgatctcctgccctcaagtgatccacccaccttggcctcccgaagtgctggggttacaggtatgagccgcccggccagaggtaccattatatcttgaattttttttttttgacattctgcagtttgtaatatgtttgcaggtaacttttattggaggcacatcacctcttaaaacttttaagtttcaaacttgtaacttttgatttttgagttgtcacttgggtattttataaatgtgaaagaaaattatttcttgatattatggtttttgtctagaactggttgaaataagcccgaaattctagcacctaaaacttttttaaaaaaagtgatttaggcttgcaaatctcgtgatgtaaatatatccaccaagagcgttctaatgtcagctttaaaggaaagaaaactggaatccaatgggatgacatgctaaagtgttacaaatcaaattattacttaaatctcaacctctgaattgctgtttaatactcagatattctcctaaaaaatttccaggttgattcaaataacttaggttaaactcaacttttacgtgttgggatggggaagagaagacttatttgtagccttcacacctttatgttcctgtttcagtatttgcatttgatccattgaaatttttatttcatttggtatggttagggtaaaacaaatcatttgagaaatgacattttgttctccctctccctccaaaaaaaaaagattatgaaagccacttgtaaactttttttgtaaaaatgaccaaaagactggaaaagttaatgttaggcaaatcctggaaatatcttttggagctgtttctgatcatcttgagtgatggaaatgatgagggtcatctgttgtcttcattactcagtgaacacgttttgtcactgcttggtaaacgcttaatgccgtatgcacttaaaaagcacctggaaagataggattttaggatctggcatataattaagtagggtaaagatccttctggtcttggtacagttttgtggccctgggttttgtgcttttttgttttttgagtttttcccccatttcaaagacacagggcagatagtgtgtaaagtatacctgctttttgaccagtagattaatgtacacagtggagaagtggtaaggctttttaaaatgtcagctctactttttttttttttttttttttttgagacagaggtttactctcgttgcccaggctggagtgcagtagctcgatcttggctcactgcaatctcaacctcccaggttcaagcgattctctgcttcaccctcctcagtagctgggattgcaggtgtccacaaccatgcccagctaagttttgtattttttagtggagacagtatttcaccattttggccaggctggtctcgaactcctgacctcaggtgatccacccgcctcagcctcccaaagtgctgggaatacaggcgtgagccaccatgcccggctgtcagctctattttcttaaaatgccattgtgttagtggttcgtcatcctaaccaaaacattttgatcaagaccatttattttccagctctgtaacttgtgatatgctatgttttattttattttggcttgaatgtttacataagagtttgcttctggagtcttgcagatatagctcctgatttagtgaggcatttctctcctcagtattaaattgcaaaacattttactaaagtgctttaagtttttctggcaattattctcaaggccttgtaagttcatttataggacttcaagaaggttgtctctggttgatagtgagataaagtgacttttaagttgtaaatcttgaatgcgttacaatatgggggtcttattccagcaggagttcatcttctatagcagaggttggaattgtattggcatgtccagtgaatggataatagggaggagggaggaaagggtttctgccttggtggccttttggcattattttgtgtttttctttgcttttctctctcttctttatttaataaaaacaaaaaaatggaaacagttgaaaattaatgcaaagtggtatttgtagggacattaagtggtaaataggaaagagaaaaagagtaggaagagtgttgcagatacaagtgggagtgtaaaatactttttcctggtatatttacaaaaacaatttgagagttattctgccaattcatatacccagcaattaatggaaaagtaaaagatgctagttttatgtttgtccagattttagggtttccttctttgaagatttctaaagttgaatatttttttaagtgaggcaagcagtaaaattaatgggcaaatgaaaccaattataccaagtctaaaatttttcttttttttttgaggcagagtctcgctttgtagctgggactacaggcgcctgccaccatgcccagctaattttttgtatttttagtagagacggggtttcaccatgttggccatgatggtctcgatctcctgaccttgtgaacctcccatctctgcctcccaaagtgctgggattacaggcgtgagccaccgcgcccagctaaaaattttttttttttttaatacttttaagttttaggatacatgtgcacaacgtgcaggtttgtcacatatgtatacatgtgccatgttggtgtgctgcacccattaactcgtcatttagcattaggtatatctcctaatgctatccctctcccctccctgctaaaaaattttttaacattgaacttcgcaggtgattttttttcgcttaatagacggtagtttcattttgaaattttcatgggaaattactgctcactttcccagaagcgcttaagaggataaataataattgaggtgttaagcctcttctgagcaatttggatataatttgtttttagatctagattcttttttataaatgtcccaaagcaattagaagtgattgttttttttgagacggagtctcgctctgtcgcccaggctggagtgcagtggcgcgatctcgggtcactgcaagctccgcctcctgggttcaagccattctcctgcctcagcctcccgagtagctgggactacaggcgcccgccaccacacccggctaattttttgtatttttagtagagacggggtttcaccgtgttagcaaggatggtctccatacactgacctcgtgatccgcccacctcagcctcccaaagtgctgggattacaggcgtgagccatagcacctggccctagaagtaattttgttgagagagagagagtaaaactaaaagtactgaaaagagtaagagagtagctaagagaatgagtattggagtcagactgctagagttcatagcccaggcttgtatttattaactgtgaactttgggccaaatacttaacctggctcaacctcctcacatttattcctaaccacagccctgtaaggtgggtgcgcaccttataggaatccaccttacttacccaccttacaggattgtggttaggaataaatgagaattctctttatcagatgcttaggactatgcttgcttctgtgtagtatgtgttcattgttaactgtttttaactttactgctaaatatatcagaaggaaagcagtggtagatggtttgggggttgtttttgtttttttgatttgcaacgaagtcttgctctgttgcccaagctggagtacagtggcgtgatctcggcctatgacaacctccgtctcccggcttcaagcgattctcctgctcagcctccggagtagctaggactacagctgcgcagcaccatgcccggctaatttttgtatttttagtagagacagggagtcctgacctcgtgatccacccacctcggcctcccaaaatgttgggattacaggcatgagccaccgcgcccggcctgtttttgtttttcgtggatatacagtagtccccccttatccttgcgggatacattccaagatctccagtggatacctgaaaccctgtatagtagtgaatataattgtcatcagtcagaacacgtttctgtccgtgtcttccacacacaaatttaatgccttttccatcttaactaatcacttgtcatgcactgtggctgtgatgtttgcagtttgaggtacaacagcaaaactatcacgaatttttttccttcacaatttcatgtatagatttgatctttgtaacctccgcatacaattttttttcattccttattaagtcaagaactttcaccttcaagcaatttacagcttctctttggcatatccaaatagctgtcattgctacttttggacttagggactgtcattaagtaaaataagggttacttaaaactcaagcattgccctgccccatagtcagtctgacaatctgataactgagatggctactaagtgacaaatggctggtagtttatacaggtgaatacattagacggaggggagattcactacccggtcaggtgagatttcatcaggctactcagaatggcgcacagtttaaaacattgttgtggctcacgcctgtaatcctggcactttgggagattgaggcaggaggattgcttgaggccaggcattcaagaccagcctgggcaatgtagtgggaccccccatccccccaccatctctagaaaaaaaatttaaaaagtcagcaaggcatggtggcatgcatctgtagtcctagcttcttgggaggcttaaggtgtgaggatctcttgagcccaggagttttgaggttacagtgagctatgatgacaccactgtacactccagcctaggtgacatagcaagactctgtttctaaaacaacaaaaattagtgtttatttctgcagttttctttgtaatatttttgtaccacaggtgtttgaaatggcagaaaatgaaacggggtaaggatgaactcctgtatagatagactggataaagagaaagccaagtgcatgatgttcatagaggagtcttaagagtaagccttatgtcatctatccaaatgttgttttctaggagtataagaatataggaacagagcttaaaatggaaaaatactgtacagttagccttccgtatctgagggttccgtgtttgtggagtcagccacagattgaaaatatttaggggaaaaaaatccatggttgcatctgtactggacatgtacagactttattttcttgtcattattccctaaacaatacagtgcaccaactatttatgttgcatttacactgcattaggtattgtaaataatccagaaagaattcaaagtatatgggtgggtgtgtgtaggttatatgcaaatactacatgtcccctttatatcagggactggagcatcctcagattttggtatctgcagtggagggagtggattctggaaccaattcccagcagataccaagggacaaccatatatatatagtatcatgacatcttgtatcatgtcacgtatatatatatcatatatattatcatgtcacgtatacaagacatcttatatatcctatcatgtaagatgtcttgtatacgtaagtaatagaaatgaaaatcagcagatagttaaggcataatgagaaaatggaaaacattgttcttgttagaaatgtttaagaatggcttcttgataaagaactgtgttaagcatattctttcttctttttagacacagagtctcactctgtttcctagacaggagtgcagtggtgcaatcctggctcactgtagcctccatctcctgggttcaagctattctcctgcctcaacctcccaagtagctgggattacaggcacctgctaccatgcctggctaatgtttgtatttttagtagagatagggtttcaccgtgttggccaggctggtctcgaactcctgacctcagtctgcccacctcggcctcccaaagtgctggtattagaggcgagagccacagtgcctggccaattaagcataattttttctatttttcattttcttacatggatctttttttttttttttgagacggagtctagctctgtcacccaggctagagtgcagtgacacgatctcggctcactgccagctccgcctcctgggttcatgccattctcctgcctcagcctccctagtggctgggactacaggcacccgccaccatgcccggctaattttttgtatttttagtagagatggggtttcaccatgttaggcaggatggtctcgatctgctgacttcataatctacccttctcggcctcccaaagtgctgggattacaggggtaagccaccgtgcccagccacctgggtcttaaagaataaattttcttgagatggagtcttgctgtgttgcccaggctgaagttatcctcctgcttcggcctcctgagtagctgggattgcagatgtgagccactatgcctgcctctaagaaactttcttataaaggaggaagaagaaaagtagcagtgcagtgctccaaagaatttttttacaacacttaaggaagaactacctttaacttgtagcactagagactctgtttcaaagaatgcacaagaatacttacccttattacttgtaatatactctcatattttctgttgcttttttttcttttctttttttttttttttttagtactggttgcagcctactatattgatttttatgacccactgttggcttttgagccataatttgaagaatactggcgtagaagagttgacaagatggcagttattctgtattaggccaacattttctgtatgccaggaacttatcctctgtacattgttccttctttccttcctggagtttatagataagggaagaagactggcattcacggagtctggtgtgatcagcattgtatttgggaagtacgtatatagtgggaggaacaggagaacctaacccagtagttatcctggtggctgtctttgaggaattgtgtctgattttgggatctcacagatagagataggattagtaaaaatgagcccaggctagaaaggagactgtgtgaggccaggtatatcctgttctgggaacctgtgagtgctgtctgactggtagaatagccaaaaacttgactgtagaggtgagcaagggggccaatcatggagggcttataatacaggaatttagactttccattttacccatttaatggatggggcagaattgtgctttaggcagttaagtaaaaggaggaatagtttgggaagaacagggaaaaacaggaggcagggagaccagtgaaacagctgttttagggttccagccacccttaccacagaagatggaaagaagtggaaagatttgagggaagatggatgatcagcagaacttggtgactgattagaagttaggtagtaagatggacaaatcaaggataattccccagtttaaagtttgagcaacttgttgggtgatgatttatttattatttatttatttattttgagacaatctctgacccaggttggagtgcagtggtgtgatctcagctcactgcaacctccgccttccgggttcaagcgattctcatgcctcagcctcccaagtagctgggactaaaggtatccaccaccacgcctggctaatttttgtatttttagtagagatggggtttcaccatgttgatcaggctggtctcgaactctggcctcaagtgatctgctcgccttggcctcccaaaagtgctgggattacaggcatgagcagctgtgcccagctggataattatttaataaattggggagcataggaagcatagtatttgtgaagtgggtaggcaggtgtgatgggggtagtgatgttacatttggggcattttgaagttggtggttcttctgagttgagcagtcagtcactcttcatttgctgcacctttatctcattttagccaacagacattgaatacctaccaagtcttaggtatttgcaatgtaaagacaaattaaggtgccttctgctgtcagagacttcagagatacagtggggttggtatacatgtccacacagttttcccgtaagttatgctttaaaaggttttttaaatgttatatataaaggcaggggatgggttgcttttgacagagtaggtttggagcgttgatggaaaacttcatggagaaaatgtatatttgaacagggttggtggaaattaacataccttagaagtagggaaagttggaagggtttttcagatgaagctaacatgtttctgatgtggctagaatatacgctgtgtgatagggtttttcatgggagagagatgggaaaggatgttggggttctattgtggaaagagaaatatgctaaggaatttgccatttatcttagcatcaggataagaattgtatgagcaggggagtgacatggttggggaaagactaattctggtaacaccgtacagagcagcagtaggtagaacctatggcaggaagactaggagtacattatttacctcttttgaaatgagtttgtcatttgccttggaagtttttggtacattgtaattaacaaagtgaattgtttattttgttcaagatccatgcttggtttgccagttgttataaatgtagaaaatataccagataccaacttagaaaccattcactctccttgttatttacagatatgcaaggtttttttgttgttgtttttgttttgttttgtttttaaagggtatgtttctccatctaggattccctgtaggccttcccttgtaacaaatctcaaggtttgctcaaaatcaagaaatgttcagtgacagttaagttagcacacaatttaggcttactataaaacatgtccttgagttgattcttaaggtgggattttaataaataatagtgtcttcatcatgtagtttttttggtttttttttttcatacagagtcttgctctgttgcccaggctggagtgcagtggtgtaatcttggctcactgcaacctctgcctccccggttcaagtgattttcctgcctcagcctcccaagtagctgggattacaggcgcccgccaccacacccagctaatttttgtatttttagtagacacagggttttgccatgttggccaggctgacctcgaactcctgacctcaggcgatccgcccgcctcggcctcccaaagtgctggggttacaggcgtgagccaccatgtccggcctcatgtagttattttcacaagaagtgtcactatattaatacattgaaaaagagcaaggtgaattgtcaatgtgaattttctaaacatggccccaggtcacattcttgatcaattaaagcacttcacctctttaaaattcaagacttaaggctgggcgcagtggcctacacctgtaatcccagcactttgggaggctgaggcaggtggattacttgaggtcaggaattcaagaccagcctggccaacatggtgaaaccccatctctactaaaaatacaaaaattagctgggcatggccgggcacggtggcttacgcctgtaatcccagcactttgggaggccaagacgggcagatcacgaggtcaggagattgaaaccatcctgggtaacacggtgtaaccccgtctctactaaaaatacaaaaaaattaaccccgtctctactaaaaatacagaaaaattagccgggcgtagtggcgggcgcctgtagtcccagctactcaggaggctgaggcaggagaatggcgtgaacccaggaggcggagctagcagtgagccgagatcgtgccactgcactccagcctaggtgacagagcgagactccatctcagaaaaaaaaaaaaaaaaaaaaaaagccgggcgtggtggcaggcgcctgtagtcccagctactcgggaggctgaggcaagggaatctcttgaacccgggaggcggaggttgccatgagctgagattgcacctgggccacgagagtgaaactgcatctcaaaaaaaaaaaaattcaatattgaaatgttttgggtttttttgtttgtttgtttctttttttgagatggagtctcactctgtcatccaggctggagtgcagtggtgcagtctccactcactgcagcctccgcctcccgggttcaagcgattctcctgcttcagcctcctgagtagctgggactataggcacatgccaccacagccggctaatttttgtatttttagtagagatggggtttcactatgttggccaggctggtcttgaactcctgacctcatgatccacccacctccgcctcccaaagtgttgggattacaggcgtgagccaccacccctggcgtgttggggtttaaaaagaataaacttcaagttaatctcttcccaaagtataagtataccttttgatgtcatgatagcaggaccatgtgaagagtacatattttgaaatttgcttgcacttttgccctttcactctattggatttcaaaattcaacagctgtcagcatttgtagctgtgtaatcctgtataattatcatcttttatccaaatttgtataaaacttacaagttttcctaatttttttggagtattagagatcttgcctgtctttccagcatggatattttattttaattttcttaatgttccttcaaattacgtagtttgaaatgtttgtacatctttatttccttgctagatgggttgtttatatgattagataattcttcatttacagagggttaaagtaactttttttaaatgaagtactgaatagaggttaggaaagttgttggaacctgataaatttgtaaaatttacaaaatttctcattttaaaagctacagttttaaaatttcatgctttttaagcatccattgtaagagtaggagtgtccaaaagcaataagaacaagaaatctttgtaagattggtagtttcagtgtttagccaaaccattatcagaattagaatgactaatgttatgtaggtttggttttcaactccattctttttttgtttcattttttaaaaaattccaaatctctaacctggccttggcgctctgagtcttctgatctctgcccacctcatcactcactttgttctccccattttgtttatttcaattgctgaactggctgagcttttactctccccaccttaggttgttccactcttcatctgtcaagctcctactcatcctgtggactcaaccactgggttagatgaaagaaaagtttgacgtgtccactctttaaaaacattaagtgttttttgttgtttgtttgagactgtcgtccaggctgtagtgcagtggcgcaatcttggctcacggcagcctcgacctcctgggctaaatgatcctcccacctcagcctgtagctgcaccaccatgcctggctaatttttaaattttttttgtagaggcagggtcttgctatgttgctcaggcttgtctaaaactcctgggctcaagcagcctgccttggcctcccaaagtgccatgattacagttgtgagccacctaccaggtctggcctaaaagcatttttttatttttattttttgaggtgggatctcgcactgtcacccaggctggagtgcagtagcgtgatctcggcttactgcaacctccgcctccaaggttcgggtgattctcaagcctcagcctcctgagtagctgggattacaggcgtgcaccatcacccccggctcatttttgtatttttagtagcgatggggtttcaccatgttggccaggctggtctcaaactcctgatctccgccagcctcggccttccaaagtgctgagattacaggcatgagccacggtgcctgacctaaaagcattttaatgccacagagaaagccagctaaagggaggaggagcagtagatggattctgtcttctaagtgggatttgagaattgactggattttaaataattaataaaggtgttttacttaatgaacacagtttaagagaactgagttgattttacttcattttacctaaagtacaaaggtaagtgtgtttactcaaataatatgtgagccttttaagtaaaaaaaaaaaaaagtgtaactgtgagagatactaatatagtagaattagattttgagccaaaattgttttaattttaaattacattttgtgtcatagttaagtaactagaaaattgtctgatttatgttcatagtacagtgtttgggattatatttttaatggttctaattttgaaggttatgcttcatttatatataatacttcatttgttcaatttctcacgtatcattgaattattttgatcctttgatttttggaaaggctaaatgaaccgagattattttttatttatttatttggagtttggcttttgttgcccaaactggagtgcattggtgcagtctcggctcactgcaacctctgcctcctgggttcaagcgattctcctgcctcagcctcccaagtagctgggattacaggcatgtgccaccacacccagctaattttgtattttttttttgtagagacagagtttttccgtgttaggctggtcttgaactcccgacctcaggtgatagcttgcctcggcctcccaaagtgctgggattacaggcgtgagccaccacgcccggccaccgagtttattttataagggattatatggttacatctgttgcaaggagcaaaccacaagcaatatagaagacaacaagggtgatctacagaatcagtatgtgataatgaaaggatgttttgactcaacactagtttccacgtgtttaatccaaactcagttgttgtttaaattgttaaatttctaatacacggtccactgggtaaaccatgtattaggctaaacttttctttttctttttcttttttttttttttttttttttgagacagggtctcattctgtcgcccagtctggagtgcagtggcgtgatcatggctcgctgcaacctcaacctcctgggctcaagcaatcctcccatctcagcctcccaagtagctgggactacagatgtgcaccaccatgcctggctaattttcgtatttttttgttgacactggtgtccttctacattccaggctggccttgaactcctgcgttcaagcaaccctccagccttggccttccaaagtggtaggattataggcgtgagccacggtgcccaacctatgctaaacttttcacatcagatttatatgtgtcctgtcccgttttacttcaccatgattggactcagtgtacactcagatgaagaaacttcaaaaaaaaaatactgctccttgtgaagcagaagaaagattttactgaaagtgatgtttgtattggagcatcattaaaggcataaaggaacttgtgaacaaactacttggtagaagcagcctggtgatgttgattggttgatactttaggaagcgggaaatgtcttactggagatagttccttcatttcaacagtcatttgtgatactgttttttaatatttgccataggatagttaaaaggtaatggaacaaacttcagatttataagtttttaattaaatataaagggggcaaaagtagataaatatcttaagagctcaccttactgtctagaaaaaatacttgctggcccagcgccgtggcacacatatgtaagtaatcccagcactttgggaggccaaggtgggaggcttgcctgagcccaggagattcagaccagtctgggtaacatggtgagacccccatctcaacaaaataaaaaattaggtgtggtgatgtgtgcctttggtggcagctactaaggaggattgcttgagccaggaggtgaagctgcagtgtgctgtgatcccgtcgctccactccaggctgggcgacagagcaagaccctgtctcaaaaaaaaaaaaaaacaaaaaaaaacggaaaacataagacagcaatcaaatacaatagatttggcttcagtaaatgaaaaccctcactgtaggccctagaataacaagacttctatattactaaagctgattactgcttgatgaactctgtacatgtgatgtgactagtatgaacttctgaggttgttgagatgaatgagaataaacgtgaggtgccaagaaaaatgcctgacacattgaaagtgctggataaatgtatgctgtcatcattgtaagctgggctatctcctaatagtgtaatgagtccattgaataacaataggtaacatgtttatagtgcttagtgtgtgccaggtactgttctaaacactttacatttattcactcatttaatcacaaataacatgaagtaggcactttgctgttatgcagagatggaaacaaggttatccctgcatcttttttttttggcagggggaggaggacgggaacggatggagttggtttttttttttggagcttctgagacccaagcttcaggccatgctcccccaagcacctccccaccaccaccccccaagatgtagtcttgctctgtttcccaggctggagtgcaatggcgtgatctcagctaaacggaacttctgcctcccgggctcaagcaattctcctgccccggcctcctgagtagctgggattacaggcgcctgccaccacgcccagctaatttttgtatttttagtagagatggggtttcaccatcttggccaggctcgaactcttgacctcaggtgatctgctcgcctcggcctcccaaagtgctgggattacaggtgtgacccactgtgcccatcctgttccctgccccccccccctttttttttaagttattgagacagagcctcacttggtcacccaggctggagtgcagtggcaggatcatagcgcactgcagcctcaacctcctgggctcaagcaggccctttgagtaactgggacctgtaggtgcatgccagcatatccagctaattttttttttttttttttttttttttttttttttttttgagacaaagtctcactctgttgcccaagctggagtgcagtggtgtcattgcaacctccacctctcgggttcaactgattctcctgcctcagcctcccgactagctgggactacaggcatgctccaccattcccggctgatttttttatttttagtagagatgggatttcactatgttggccaggctggtcttgaacacctggcctcaagtgatccacccgcctcggcctcccaaagtaaagtgctgggattgcagatgtgagctaccacatccggcctatatccagctaatttttaaaaataatatttttgtagagaggtggtctttctcccctcggccttccaacgtactaggattacaggcgtgagccacccttctggctgtcttttcctttttattttttcacacttccagtggtccttgggatctgtgtatactttagaatcatcttgtccagtttcttgacaaacttctagaagtttgattgatactgcattgaatctatagatcagtactggggaatgatgtttttaatactgaggatttctaagtgtttgagatattctgtttagtcagcctttacttttgagtttacacctgttttatatacattgtcagtttttccctatgttataaatctttttttttttttttttaaatttgagatagagtctcactcttgtcacccaggccggaatgcagtggtacaatctctgctcactgcaaactctgcctcctggatgcaagcgattctcgtgcctcagccttctgagtagctgggactacaggcatgtgccaccacgcgcagctaattttggtatttttagtggagaccgggtttcaccacgttggccaggctggtcttggctggtcttaaactcctgacctccagcagtccacctgtctcagcctcccaaagtgctaggattacaggcgtgagccactgtgcccggctctacattatttaaaaaattatttgtaaccatttgttgctggcatacagaaattcactttgatacgtttatatttatggtataaccagtcatcttgctaacctctcacaatttccagttgtatgtatttctttaaaattgacaacagttgtgtatattcatgggttatagtgtgatgatatatgtatttgctttgaactttctatgtcaacagttatattatctacagacaataagttttgtttcttcctttttcctttttctttctttccttcttttttgttttgagacggagttttgcttttgtcacccagggtagagtgcaatggcactatctgggctcaccacaacctctgcctcccaagtcaagcgattctcctgcctcagcctcctgagtagctgaggttacggcctgcaccaccacgtaccgctaattttgtatttttggtagagacggggtttctccatgttgctcaggctggtctcgaacacccgacctcaggtgaacgcctgccttggcctgctaaagtgctgggattacaggtgagaaccaccatgcccggacttttttctctttttttttcttttttagaacttgtaaccttttttttttttttttttttttttttgagacagagtctcactctgtcgcccaggctggagtgcagtggcgcgatgtccactcactgcaagctccgcctcccgggttcacgccatcctcctgcctcagcctcccgagtagctgggactacaggcatccgccaccgcgcccagctaattttttgtattttttagtagagacggggtttcactgtgttagccaggatggtctcaatctcctgaactcgtgatccgcccgccttggcctcccaaagtgctgggattacaagcgtgagccaccatgcctggccacctatttttttatgtgtgtgtgagacagtctcgctctgtcacccagcctggagtgcagtggcactgtctctgctcactgcaacctctgctcccctgggttcaagcgattccttgcttcagcctcccaagtagctgggactacaggcgcctgccaccacacccagctaattttttgttttgttttgtttttagtagagatgtggtttcgctatattggccaggctggtctcaagctcctgacctcaagtgatctgcccaccttggcctcccaaagtgctgggattacaggcgtgagccactgtgcctggccaagatgaatcttatattttctttatcctttgttactatggcgaatgacagtttatagatgttctggtgtcccctggattcctgggattatcccaacttgatgatgatttttgagcctttggtttgctctttttaaagagtcttgtttctgtgtccatgaagaagattggcctgtgtttttcttatattggccatgtgtaatttttatattatttgttttttttttttagaagtatttgtgttagcttgaattgtattttccttgaaagtttggtgtagggcatgcctgtaaacaattcggatatggtgctttctttatggaaagattaaccaagggcttattttctctagtagcagtaggattacagtggtctggcttcccatgtgcctattacccagcttcaggtttactagtatattatactacccttccccccttttttgctggagtattttaaagcaaatcctagccatgtcatttcaccagaaatatttcaatgtatatctttcagtaaaaaggatttattttaaaataatgccattgttatagtcaataaagttaatgatttcttaatatcacccatttctcagtctgtacctaaatatgtcttactctcatttcaaaatgtgtgtttatagttggcttgtttgaatcaggattccaccccccccccaacttatgctatggatttgttggagaaactgggacattccatatcctatatgatttcttttttattaaggtttgagtattttctccggaatttatttattttgtatgttttcttcatttgtataaagttgatagtattgctttatcttttaattttctttttttcttaaccttcttgaagttcgtcttttgttactccaaaaaactaacttctagttttggtaatgctgttacattcctatttcctgtttcgtttatgcttttgtctttgattgtcttcttcatattaatactatttttctaatataatttggatacttaattcattattagcaacctcaggagactcactggagagttcattaatttgtaactttatttattattattatttttttgagacggagtctcgctctgtcgcccaggctggagtgaagtggcgtgatctcggctcactgcaaactctgtctcccgggttcatgccattctcctgcctcagcctcctgagtagctgggactataggcgcccgccaccacgccctgctaattttttgtatttttagtagagatggggtttcaccgtgttatccaggatggtctcgatctcctgacctcgtgatccgcccacctcggcctcccaaagtgctgggataacaggcgtgagccactgcgcccggcctttttaactttattttctaacataggcctttaggttttgaaatatattttttattactcaatttcctttgtgatttcttttgtaatttatcactgcctgtttttaaaatttctaaagtggagatttttttgccctctatgttcagtatgctaatgataaaatattttcttggatactccaggggaaaagtaaaaattgcaaataaagtatgatctcagttttgtaaatcacgtaagtataaggaaataatgaaggaactatatcagtatattaagcaggcatttttgaatagtggttttaggtcagttttgttacacatttgggtatttgttgttgttgttgttgttgttgtttgagataggatctcgctctgtcacccaggctagagtgcagtggtacattcacggctcactgcagcctcaacttcccaagctgccgctatcctccttcctcagcctccctagtagctgagaccacaggtacaggccactaggcctggctaagttttgtatttttttgtgcagtttggttttctccatgttgcccaggctggtctgctgagctcgagccgtctgccctccttggcctcacaaagtgttgggattacaggttgtgagccaaagtgctcagccttgtggcacatttttgatggaggagcccatatgatatttcaaaaggaaagagtaattctgtaaaactctggactctaaattatgccctgagatcttgggatacaatttgacttagttcatatatgaccacatgttggtttagttaatatatgaccatgtgcttactatgttgccagtaggcaaggagctggtatataagtggtaaaacatgtccttcgcgaagaatgcatggttggagtgaggggtggtcacaagggatggcaaggggaggagaggaggcaaacccagagataatttcagtgacatgataaaatgctaaaagatacagaaggagcaggattgggaagaaaaaaaaaaactacaagaagaggaagggcacatacaggaagagttatacttaggaactaagattaattggatcaagtagaccattaaggcaatattttgtcttcaagggatggtccattttttaagaggataatagctgtggaatttttgttgttgttagtagacaaggtctcacagtgcccagacttgatgtgaattcctgggctcaagctatcctcttgcctcagcctcctgagtagcttggactatagatgtgtaccactatgcccaacacccagtaatgcctttttaatgtgaaaactactttagagaattgaaaggaaagaaaactcaaataatttctataataggttaatactgtcaataggtcaatcaggagtaattttcttcccccaggggatgtttggtgatgtctggagacagttttgattgtcacaattgggatatgggtgctactggcataagtagaaagaccaggagtctcctaatgataatagagggcacaagacaatcaccctccacccacaacaaagaattatcacatagctcaaaatgttaatagtgccagggttgagaaaccctgcattaatctatacttagcacccagttttgtttgttcttttttgagacaggatcttgctctgtcacccaggctggagtgcagttgtgcagttaaagctcactacaacctcaaattcctggactcaagtaatcctcccaccttagcctcctgagtggctaggagtatagcctagtgccaccacacccagccgactttattgtttgtagagacagggtcttgctgtgttgacctgggctgaagaattcctcctgccttggccttctaaagtactgagattacaggtgtgagctaccagggctggtcttgcaccctgtttttggtaggggtggtttgtatggtgaaggagccagaggcatggtgttgtaccctattctggctagactttggttaaggaaagctattctgtaggctacaggtcaaaaactccgcctgttaaaggcctactttgaggcaggtactatataggaacttggtaaaaaatggtggatagccctctgcttaactggagcacacactgagtgttccacaaatgacaggtcttttgtatcagttgtgtgtctttatgtattacaatatttaaaatgttttctttccatcctgagtttagtttgtgtgtagatattttaactgttcttctaaggaacttgggaatattaatacagcttaattgcatttcttttttccatgactgtggatacaaacctttagctagcaactcatgtaataatgggtgttgcactttttttttaacaaaaaataaaattttatttcaactattatgctaattctataacattatttagaatgtttttctttttttaattatcctttaagttttgggatacatgtgcagaacgtgcaggtttgttacataggtatacatgtgccatggtggtttgccgcacccatcaatccgtcatctacattaggtatttgtcctaatgctatcctctcctagccccccatcccccagcaggccctggtgtctgatgttcccctctctgtgtccatgtgttcgtatttaactcccacttatgagtgagaacatgcggtgtttagttttcttttcctatgttttctgagaatgatggtttccaggcttcatccttgtccctgcaaaggacatgaactcatccttttttatggctgcatagtattccatggtgtatatgtgccacattttctttatccagtctatcattgatggggggtgttgtactttcaatcccttttttccttggtcttattttaggtatagttcttaagtgtttaagtttgttgatataaccaaatatcccctcaatttaaaaaatctataaaatggttttagtatgacctaaaaaactaccatacaaatagtatatatatagggctgtgtgtggtggctcacacctgtaatcccagcactttggaaggccaatgcagacagatagcttcagctcaggagtgtaagaccagccaggtcaacatggcaagctccgcctctactaaaaatacaaaatttagctcggtgtggtggtgcgcacttgtagtcacagctacttgggaggctgagatggtagaatcacttgaacctgtggatagaggttacagtaagccaagatcgcgcaccactgcactccagcctgtgcaacagagtaagaccctgtctcaaataaatagaaaaacatggagtgaggttgggaaatgacatttaatgcttattgagaacaatatagagcagttttttattttggttttgtcatactttgacctttgtcttttccctttgcttttagattttggctctctatttgacttggagcacgacttaccagatgaattaatcaactctacagaattgggactaaccaatggtggtgatattaatcagcttcagacaagtcttggcatggtacaagatgcagcttctaaacataaacagctgtcagaattgctgcgatctggtagttcccctaacctcaatatgggagttggtggcccaggtcaagtcatggccagccaggcccaacagagcagtcctggattaggtttgataaatagcatggtcaaaagcccaatgacacaggcaggcttgacttctcccaacatggggatgggcactagtggaccaaatcagggtcctacgcagtcaacaggtatgatgaacagtccagtaaatcagcctgccatgggaatgaacacagggatgaatgcgggcatgaatcctggaatgttggctgcaggcaatggacaagggataatgcctaatcaagtcatgaacggttcaattggagcaggccgagggcgacagaatatgcagtacccaaacccaggcatgggaagtgctggcaacttactgactgagcctcttcagcagggctctccccagatgggaggacaaacaggattgagaggcccccagcctcttaaggtaagtacagttttggtttgtgtgcacaatcggcatgcatgtgagtattgtcatgatggatggagggtttgccttacattgtatagcagtttccactattacacgccaggaatttactgtgctgtcataagttttaagaagtgcctgtatttaagtaaaacgtttattttacagctggtattctataacttcatacttccaaatgattgctggctaatgctggttctctctggcacaagtattggaatgtttttatctcatttccaagtccagtttagccttgtagcctccttataaaattacagttttgagatggctggcattacactatcttcagatggatactccatttgttcctattgctttgaatgtccctggttttcaagagatacatttattctgagaaatgtattaactgttatttttctttattggttgatggaaattaaggtgcatttgttcatgtgaaacctcaacagtgtagatgtttcagtgaaccagaacttggccaaagacttctgttagctttattaactagagaatgctaagtatattaaaaatattttaaacttttaaatgtggatcctgtatacataaataaggcataatcacacatactttagtgcttatttcttcatatttttctttacatattttatctgtttttcttaaaatgggatcacactatggttgccagtgcctggcatgtagttcgtttttgttgaatgagagatggcttcacttcgaagatgaaattggagataggtacgattttcacaaggagtcaagagcaagctttctctgtaacaggaataatttgagcagacatcaggacttctgtgttcctgagaatcttgggtgcagtggctcatgcctgtaatcccagcactttgggaggccaaggctagaggatcgcttgagcccaggagttaagagaccaaccaggtagcattgaccccatcttctatttaaggggaaaaaaaaaaaaagaaccttgatggtgacagagaatgcaagtgtgaattgaagacagatggacaaacttgtgttggggggaactgaggtgacatgtaggaattcaaaaaccttaaatttttttttgctgcgagaatattgacaagttaggattctgttttagcattcctttgtagattctccctttctgcccctcacccccgccaccttttttttttttttttgagacagggtcttactctgtcacccaggctggagtgcactggcctaatcatggcttactgcagcctcaacctaccaggcttaaacagtcttctcgcctcagcctcctgagtagctggaactgaaggcacataccaccatgcctggcttattattattttttttttttttttttttttttttaagagatggggtctcactatgttgctcaggctaatctcaaactcctcttgggctcaagtgatcctcttgtctcagcctcccaaagtgccaggattacaggtgtgagccactgcacccatcctctgacacttttagattgccgtgtcagtgtagtttacttagaatatttggagtgagaaccaaaaacaaggtaaattattaagtacctcttctaggatctaggaacatagctatgaagagagaaagtccttgccaccgatgtttatattctgttacggagaggagggatgacttacaataaaccctcactggtggacaaaatactttagggttaaagtagtgaatgaacttattttatgtaacctactttctactgtgcacataagatataaattttagagtatgccaggtaagtgctatggagaaaaataaggaaaggctcattgacatctgcttgggggtgtgggactattatggttataatcttaatttctttcagaaactgggtttatatagaagtgagcaaaacaaaaatccctgtccttgtggagcttgtattttgatgagaaggaggaattcaaattttaaacttctgttaaacgatattttatttccttatttgatttttattttgagaccgagtcttgctgttgcccatgctggagtgcagtggcgtgatcttggatcactgcaacctctgcctcccgggttcaggcagttctcctgcctcaggctccaagtagctgggaccacaggcatgcgccaccaagcctggctaatttttgtatttttagtagagaaggagtttcaccatgttgcccaggctcgttgtgaactcctgacctcaagtgatctgcccacctcggcctcccaaagtgttgccaccgcacctaggcctattttcttattttaaatgaatccacctatattgatattttgtagagtacttatatcagtgtttgacaaatgagggagctttaaatgtttaataaatttaacaaatgttttaagttatgtaggtttaggataagataaccacttaaggctggatgcagcggttcacacctagaatcattccagaccagccccagcaacatagtgagacccccatctctaccaaaaacaaaaaattatccttgtgtcgtggcacacccacgccagcagttgcccttccactgtaccaagtcctaaaattatcttgtagagcgaattatactcattacatttcttaaactcctaagacttgtgatatttaagaattaggatttaaggtgtaagaaagttttcagtaagatttgatgactgtaaccctgttggcaaatgacatcagcttttgcacaccgttcttgtcatggatgaatctgtggttcaggaggtgcaggcaggtggtgacattactactacagctgtcttccaaaagtctgacctatggtgatttataggaagaaacttggatcatactgccttttaccccaatctttagattcagcataaactaatcaaagccagaatgttttaagttacttttgtttttgagacaggatctcttcctatcacccaggctggagtacagtggcaccatcacagctcacttgcagccttgatctcccaggcttacgcgatcctcctacctcagactcctaagtagctagtactacaaggactgtcatgccctgccagttatttttatttttgttgagacagggtctcactatgttgtcttggcatcaagcaatccacctgccttggtcttccaaagtgctcagattacagacaggggccactaagcctggccacatttttttcaagaagaaaaaataggcatggctcagtagttcacatctgtattcctaccgctttgggaggctgaggcaggaggatctcttgaagccagaagttcgagatgtgcctgggcaacataatgagaccccatctctacttttcttttttcttttttcttttttttcaaaaaagaaagaatagttgtctgcaggacgcatttcttgtagctgcctagaactttgtgtggcttcctcaccctctcctttttagtttaggtagctatttgtatggtggtgggtaattggacatctggagcatattagctatggagaaagaaacaagatcaaataactatagtgtagcagaaattaagtacaaaatcttccttattacatttagtgtggggagtaaagaagcagggctcaggagatagaaggggcagtgatctggaggttggttggtattttattttctaattcctcagcagatctgtgtgggagatggaaaaacaaaagctagagaatcttttttggtcacagtgaccaaaagtgtcaggaagaaattactgccagctgatcagcaatcagtgtagtctgtgtatttaaacccatagtctgccatagaggagcttggagtttccaggtaatgcatcgtgatcaagggaacaagcagtgtcaggaattggttgaaattcagttggtctaggcaggcaaggcatgcaatcatgaaggaccagattgtttggggaaatatttggataaagacattacatttattaacaagagacaacaacacagcttagaaattccaacattttgttgattcagataataggactcttgagggcataatttattgtcttagtcttttattgtttgtcatgcgggttctgtgatagaatgactttcatactatgtctatcatgaattttcatgctaataagaaacaggttaaacaactcccccatgtataggtatggatattattggagccacataggataaatactagtagtttaaaaaaaacataggtagcagcagcacttgcagtcagatttgtaactaccaaaagtagcctggacttgatttaaacctgtttctgcattctattgcccctgcaatcttttggccatatttacatagaatcaagaaggtttttttctttcttcttcttcttttttttttttttttttttttttggagacagagtttcgttcttgtcgcccaggcaggagtgcaatggcccaatcttggctcattgcaacctctgcctcccaggtttaagtgattctcctgcctcagtctcccgagtaggtgggattgcaggtgtgtgctaccacgcccagataatttttgtattattagtagagacagggttttaccatgttggccaggctggtttcaaactcctgacctcaggtgatccatccaccgccacctctcaaagtgctgggattacaggcgtgagccaccgtgcccgaccaagaaattatcttctctgaatgcttctcatttcaggccacctcattcttttatgcttccatcaaactgccacttgtaaattacttgtaaatcattcttgtaaattacttaccttagtctctgaatttcatctggaaaatgaaaatgttctttaacttttttttttcattttttggtaatagtataaagaagattaatttacatttttttgttttttttaatagaggcaaactgctgaaccaaaaaagatgtcatattcatagatttgcagagtatagatattgcatatgatttaaagaacgaattttaggccaggcatggtgggagatgcctgtaatcccagcacttaggcagaaggattgcttgaggctaggagttcagtcaactcctgggcaacatctctacaaaaataaaaacaaaaattagctgggcatggtggtgcaagcttgtagtcccatctgcttgggaggctgagatgggagaattgcttgagcccagaggttgggaattataatgagctatgataatgcaactgcactccaacctaggcaacagagtgagaccctgtctttttatataaaaagtaaaagaaaaattttattaagagctttgtacctgtccaaaacagatgcttcacagaggtagtaacatttgaaattacaaggatgagtagaatctgcaggtgtttcttagttaggttgtactatctaaggaaccaacagaaaatgcctctctgtgaacttggtgtttatttccaggttggcattaaggagtcaaataggaaagaaaatgtgctactgttcagttgtagggaaagggaaaagcttgaggcaaatgctggaggctcaaggagcgtgatactttcagactttaagaaatcagtacaggaaatatataagataccatagataggtagtcagacttcataaaggctttggtatacgtactgtggggttgatttttttcttttatagaggcaggtgaaaacagaagacaggcaaacctgttgtccacagtctgtacaagcactgtgataggtttgagttaagacagtcacagtaggtaggaatacatgggaagggttttagtgtctatgtgtgcttttagaggtagaattgaaggaccctttgattggtcttagcagacagaaatctggtatgaatcctttaattgggcagtagctatagtatcttgagttattctgagtgtttgctcaatgtttctagtagtgatgatgacttgtagttgggatcctatgtgtaatttggcagaagaggacggtggcttcaaactttgtttgggatataaagttgaccccattttgaattattttaaaataatttgaaagattaatgaaaatgcatttttataactttcattattagtaaaacgtttgactttagaataatgctgtttttcaattaattattattatagtataatggctccaggtgaacttaacataaatatagaacataaactactttttaaagtacagagggagccggcacagtggctaacgcctgtaatcccagcactttgggaggccgaggtgggcagatcacttgaggtcaggagttcaaggccagccttgccaacatggcgaaaccccgtctcgactgaaagtaaaaaaattagctgagtatggcggcgcacgcctgtagtcccagctactcaggctgaggcaggataaccgcttgaacccaggaggcagaggttgcagtgagccgaaattgcaccactgcgccccagcctgggcgacagagcgagactttgtctcaaaaacagagaagtacataagggttgcaaagtcaaatgacttgaagggccaagcaggtgacttagcaggtgacttaatagagcagctaggtttaaaacagcaaggaatagtgtggagtctggacttccgcatgctctatgtaaaggagtcagaatcagaagttttaaaaaacactgtcatcagtgtccctacacaaaaaaggacatattcccaaaccatcagttttctactttttatacaaacaaaatacaggaataattattcaaatgaggccaagcatggtggttcacgcctataatcccagcactttgggaagctgtggtgggaggattgctagagcccgggaatttgagaccagcctgggcaacatggcaagaccctgtctctattttttaatagtcaaaaaaaagaagaagaagaaaacattcaaatgcttgaacatgacaaaggggttagatggcttattaagttgaattcgccatgtagcatcatgtgtgacgtaatggaaatgaatggcaaaccttgtttaacagaattaaatgaagatgattaaaagtatttctaaaacatctttatttcaaatatttatgaaaataactctgtacatttaccatacccaaggcccctaaatcttaattttgatcttaatcttgaaaatgtattgttgttagcatactttgtatagtgggttttttttgtttgtttgtttttgagacagggtctcactctgttgccgaggctggagtgcagtggcctgatcatggcttacttgcagcctcaacctcccaggctcaggtgatcctcctacctcagcctcctgagtagctgggaccacaggcacatgccaccacatccagcttttctttccttttttttttttttttttttttttgagatggagtctcactctgtcgcccaggctggagtgcagcggcgtgatctcggctcactgcaagctccgcctcccgggttcactccattctcctgcctcagcctcccgactagctgggactacaggcgcccgccaccacacccggctaattttttgtatttttagtagagacggggtttcaccatgttagccaggatagtctctatctcctgacctcatgatcctcccgcttcggcctcccaaagtgctgagattacaggtgtgagccactgcgcccggctgttttttgggggtttttttttgtattttggtaccgatgggttttcaccatgttccccaggctgttgtcaaactcctgacctcaagaaaccctcctgccttggcctcgcaaagtggtgggattacaggtatgagtcgccaggcccggccacttggttttttgccatcatggctccctacaacctctacctcccaggcttcactgataatcccactttagccttccaattagctgggactataggcttgcgccaccatgtccagatttttgtattttttagtagagatggggttttgtcacgttgcccaagctgtagtgtcttttctaatagaagctgagaatttcctttgaaactgtctttgtgaacttggaagtgaaatcagaaaaggaataataatgtcttaaattttattgcttattttgttttcttttgtttcttactcttagatgggaatgatgaacaaccccaatccttatggttcaccatatactcagaatcctggacagcagattggagccagtggccttggtctccagattcagacaaaaactgtactatcaaataacttatctccatttgctatggacaaaaaggcagttcctggtggaggaatgcccaacatggtgagtactaatccattacagacttgttttcaaactggcattttgacaaaagaattgtgttaaactttcacccttctgttatatatgctgggatttgtacccactaggagcctaaattgatatgtacttgatgatccctgtgaggaggcttgtgcttcctttccatttctctgttttttttgttccatgtggttattgatcagtgagcatgttgatccaaacaggagtaagtgaactgctacaatgaagttttaggggcctgccattcagcaacttggtcttgtgagcgtttccatacgatacgaaagcggaacctttcacttttgggggaaggaatctctggcaaaggatccgaactctcagtgaccatatttaccaatattatttgattctactacacccaagtaaattccctctcaaaagtaatgtattgttttaaacagcaatttttgttaaataaaattttcaggaacttctagtgttatttttgtacagtcaaactactagtagtaaatgtgtctgcattcaactttggaaaaacattgtctgaaaaaatcctctttcagatgttttagttttgtcctttgtgtcattatgtttatggactgcctatatttgagatactctgccaagtactggagttatacagatgaatgaaacatgtcatctctgtcccgagaaatgttcactttttttttttttttttttttttttttttttttgagacggagtttagctcttgttgcccaggctggagtgcagtggtacgatctcggctcactgcaacttctccctcctggtttcaagcaactctcctgcctcagccttctgagtagctgggattacaggcatgtgccatcatgcccggctaactttgtatttttagtagagacagggtttctccatgttggtcaggctgatctcgaactcccgacctcaggtgatccgcctgcctcggcctcccaacgtgctagggttacaggcgtgagccaccgcgcccggcctgaaatcttcactttttaatttaaaaaactaaatttatcccagagtttagaaaaactagtttttcaccaacccgaaagacccctctgctgagtctcttgaggagttcttcattgctctttaaaacctaatttgggtgtgcttttaactacagacaccctctcacccttccctctcccgctggagtttaccatgtccttctctctgcttttgctctctgtgtattatacatacttatatcacttcgtaatgtcattttttttcttattaaattgagcttcttaaaggtaggagccatggtttatgcattccctgtgtcaaaaaatggagtctggcttatagtagactaaccataaaggttttcattgaaaatatccacatctctatttattaagaaatagcacattatgactcctaccattaaatatattgttatatctctcagggtcaacagccagccccgcaggtccagcagccaggcctggtgactccagttgcccaagggatgggttctggagcacatacagctgatccagagaagcgcaagctcatccagcagcagcttgttctccttttgcatgctcacaagtgccagcgccgggaacaggccaatggggaagtgaggcagtgcaaccttccccactgtcgcacaatgaagaatgtcctaaaccacatgacacactgccagtcaggcaagtcttgccaaggtaagtggacccacagggttactgtacttagcaatttttacagccagggagaagaaggaaaatgtgatcaagtctattttgtggtgatggatatgtttaataccttaattgtggtgatggtgtctgtatgtacaaagtcaccaaaatgtatacattagaccaggtgtggtgtctcacacttacaatcccagcactttggtaggccaaatggggaggattgcttgaggccaggagtttgagaccagcctggacaacatagcaagacctcgccgggcatgatgatgcacctgtagtcctagctgagggactaagaaggctgaggaaggaggattgcttgagcccaggaagtcaaggctgcagggggctatgattgcgccactgtactccagcctgggtgacaatgtgagaccatgtctttaaaaaaggttgggcgcagtggctcatgcctgtcatcccagcactttgggagactgaggtgggcagatcacttgaggtcaggagttcaagaccagcctgggcaatatggtgaaacctcgtctctacaaaaaaatactaaagaaaatcagccagatgtctgggtgtgttcctgtagtcccagctacttgggagattgaggtgggaggatggcttgagcccaagagggcaggggttggtgtgattcgacatcataccactgcactccagcctggacgatagaaccaaaccctgtttcaaaaaaaaaacagtgtacatatgtgtaattttttaaaattattttattttatttatttgttttttgagacagagtctcgctctgtttcccaggctggagtgtggtggcacaatctcggctcactgcaaactccaccttccaggttcatgccattctcccgcctcagcctcccaagtaactgggactacaggcaggcgcctaccaccatgcccggctaattttttgtatttttagtggagacggggttttaccgtgttggccaggatcgtctcaatctcctgaccttgtggtccacccgccttggcctcccaaagtgttaggattacaggcgtgagccaccacgcttggccaatatgtgcaatttaaaaaatatttataccccaaagcatttagaaaattccattgtctaaatgcatcatcacagttaactcactcggtaaaggtcgtcttggctgcgtccattctgtggcaattacgaataaagctgccataaacaaaatcaattttgagactcctttactgatagtgacgttattttaggaaatgataaaaacacagttttttttttgagatggagtctcgctctgtcgcccaggctggagtgcagtggtgtgatctcagctcaccgcaagctccgcctcctgggttcatgccattctcctgcctcagcctcccgagtagatgggactacaggcgcccgccaccatggcggctaattttttttgtatttttggtagagacggggtttcactgtgttagccaggatggtctctatctcctgacctcgtgatccgcccgcctcggcctcccaaagtgctggaattacaggcgtgagccaccgcgcccggccaaaacacactatcgtttttgtgagcaagtatctaaggatgtgagaagagaataaattttaaaggtcttcccatgtggtgatcctcatagactttgatttttatttgccctagcatagcatactttaaatgttattgagggtttgctaactgtcatgtaggcaagtgttcaatttaatacaatttactgcagtcatttttacccgatctaatacaatttgtatgaagtcattaaaaagtgttcttataggcatgtgtgtcataacattggtttagagtacatttgcttagaataaagtaggttgtgtatagcatggtgaaaaatgagggctcttaagccagactgcttgaggttgaatctcactttgagtactctgtgactttgtgcaaattgcttacccattctttttgcctttcttgactgtgaattctgagtattaataggagctaccttatagggctgttaggaagatgaaataagttaatgcatttatgttacttattaagtggtcaacaagttagctattattaatgtaaaaacattaacctgctcttgaaaaaatatgttttcttctctttagtggcacactgtgcatcttctcgacaaatcatttcacactggaagaattgtacaagacatgattgtcctgtgtgtctccccctcaaaaatgctggtgataagagaaatcaacagcgtaagtgatgaaatcttttgaaggtttatatgaaaagttttaaagtctcaccagtgccatttatagtactacttgattatgtgagggacctgtggtgttgtactatgttgaataaatgtttttttcccttttaatttttctgcttccctagtgcatagaattgaactgcttagggagtttgaggctgcagtgagctatggtcatgttactgcgctccagcctgagtgatggagtgagaacctgcctcaattaaaaaaaaaaaaaaaagaaagaaaaaacagtgcagtggctcatgcctgtcatcccaacagttttggaagccaaggcaagaggattcccaggagttcaagaccagcctaggcaacttagcaagaccttgtatcttccaaaaactttaaaaattagttgtgtgtggtgtgcctggctgagatgagaggattgcttgaatccaggaggtggaggctgtagtgagctatgattgtggcacagcagtccagcctgggtgacacaaggataccctgtctttaaaaaaaacaaaacaaaacaaaacaaaaaaaacaactgaacactgcttaacatccaaaataagatccaggaactctcaatacttattatttatacaaacagcaataggtaaatttatgttctgctttgaacctatgaaaatttaaagaccgttgctttggcattgggcaagttattcttttatactatacttgtgatctaaacgttccaggtacttggaaattattttaaaaagaaaaaatatgagattatttttataatattgggatatagaagagctttttttttttaagagaaaagacgagattaacactttaaaattgtaactaccacatctctatagcaacaaaaatttaagcttttagggttaaaggacaaatttgggaagtattgtacagcatttgaaaatggaattaaattttataacaagaattgggaatagaaaatagacaattcaccagagacgggaggagagaggggaactcccaatataattcactattaagaagagaaataaggtatcgtttctctcctgtagtgtaggcagaaatgatgctgccgggtgttggcagttgaatggctccaaagcattcatacagtgttggtcggaacattaataaagccctttgggaaggctattgggcattcagaatcaaaagccttttataccagtggtcccctttaccaatcagttctgcatctagaaatttcttccaggaaataatggaagacaagatccacatactcagatgtttcataatcacgtaacaataattttgtggggttttttattagacatgttagtcttttttttctcaccagcattaatttgtaatactatatcttttgtcttctctagcaattttgactggagcacccgttggacttggaaatcctagctctctaggggtgggtcaacagtctgcccccaacctaagcactgttagtcagattgatcccagctccatagaaagagcctatgcagctcttggactaccctatcaagtaaatcagatgccgacacaaccccaggtgcaagcaaagaaccagcagaatcagcagcctgggcagtctccccaaggcatgcggcccatgagcaacatgagtaagtttgtgtcatcctaataacatggtattggttgtgtcagtaaatgacatctataaacacagtgttgttagctcctttttattttttctgctacatgattttttaagtaattttttaaagattacagtgtaaaaggtcccttacagttcatctacgagaggtaactgccactggtttgtatcttccttgatccttttttgcattatatgagttcagatttgcagaaatgagatcccatatgttattccacaacaaactttgattaatactgtgtagacgggccgggcatggtggctaacacctgtaatcccagcacattgggaggccaaggtgggtggatcacaaggtcaggagtttgagaccagcctgaccaacatagtgaaaccccgtctctactaaaaatacaaaaattagtagggtgtggtggtgcgtgcctgtaatcctagctacacgagaggctgagacaggagaatggcttgaacctgggaggcagaggttgcagtgagctgagattgagccattgcactccagcctgggtgacagagcaagactccatctcaaaaaaaaaaaaaatactatgtagacatctttcatagtcagtattccatgtatcattttaaatggttgtatagtatgtcattctttcattctttttttttttttttttttgagatggagtctcgctctgttgtcaggctggaatgcagtggcacgatctcggctcactgcaacctctgcctcccgggttcaagcgaatctcctgccttagcctcctgagtagctgggactacaggcgcgtgccaccatgcccagctaatttttgtatttttagtagaggtggggttttcaccatgttggccatgatgatctcaatctcttgacctcgtgatccacccacctgggcctcccaaaatgctgggattacaggcgtgagctactgcacccggcccaacaatctcttacagatggacattgagatctccaattattctgctgctttaaactatacaacagaaattgtgttttgacttgaggcattttgggctgaaacatatagaaatgagtgtagttggtaatgatttcctcatgtctggcaggaggaatagtgtgccttttcaaatagtttttttgtgacttgtttgcctcacttcctgttttatgactgagagggaagagggagaagtgttccagtatcctaatttggggatatatatgtttctctgattgcatatgataacattggaagaattgttctaatatcttaattttgggatatgtatgtttctctaattgcatatgataaaatcaaacagcttttttctgtgtctatccctctgctgtcaagcagttcaaatatctaagctattttgtttgagtagttagacatccagcattgtagagaccaggtcttgtccaggttggtcttgaactcctgggcttaagcaatcctcctgccttggcctcccagagtgctgggattacaggcatgagccaccgcacctggcctaagattatccccccccccacccccaccccggaaacagagtctcgctgtgtcaccgaggctggagtacagtggcacgatcttggctcactgcaacttccgcctcctgggttcaagcagttcttcctgcctcagcctcccaaatagctgggattagaggcacctgccaccacacccagctaattttttttttggaacgaagttttgccatgttggccaggctggtcttgaactcctgacctcaggtgatctgcctgcctcaacctcccaaagtgctgtgattacagacatgaaccactgtgcctgaccctctaagattattttttaatacagattgagtatcccttttcctaaatgcttgaaagcagagtactttagatttttttcggagtttggaatgtttatatttgctggttgagttgagaatcccaaatccaaaaatcaaaatgctgcattgagcatttcccttgaatatcattcacaaagttttggatttctgtatttgggatgccaaccaacccatactgctattttttactttcttcctattttccactgctgtgttctgttgctcccatttttggtttttgaattaatcttcaggacatttttttctttctgtttttctttactatataataacagtattttcaaaccagtgatctgcttttaagcacatgttgagccactgtgcagtaaagtttaatgctcctgttttcaaaactgttgaacaactgttttgtcagaaactgaaagttatgagagtgaaatgcaaacatttttagacccatcaattttgattttgacttttaataatttaagatctaaaatgctagatagtgacatggagcttcttgtattcaagtttgtaagtcagattttgcagtcactggcatgactattttagacagttgtgctaatgctcattgtaccagaccatttctattttaatattctttagattcttcattcctgccctgttgttattgtttattacttggtctgttgatttcattcttttcttttttttttttttttttctgatttcattcttgaaagtagtattttcaaggaggatgtttttcttgagttttacctaatcagggacttagataagttttcttagataaattatggataactagaaacgtacgtgtgtgtttgagtttggtctcgctgtgtgcatgtgtgtttttgagactgggtctgataactggaaacgtacgtgtgtgtgtgtgtgagattggtctcactgtgtgtgtatgtgtgtgtttgagactgggtctcgctgtgtcacccaggctggagtgcagtagtgcgatcttggcctgcatcctctgcctcctgggctcaagcggtactcccacctcagcctcccaagtagctgggaccacatacgtgcaccaccacgcctggctaatttttgtatgttttgtagagacagggtttcgccatgtggcccaggctggtcttgaactcctgagctcaagtgatcgcctgcctcgacctcccaaagcagtttgtgtttttcgttacttccatgacaaccagtactaactagttaaataattattgagtgacgagtttttaagcaggactaggaaaagggatgaggagcaatcttgccttttcaggcttccttttacctcttctgtattgaaaataacatgtacagcggtaatggaaagttggacctggacactagcatattttcccctcttgttttatatcttctgtcttggaatgagcattgcttttttctttctttctttctttttctttttgagacaacatctcactctgtcgcccaggctggagtgtagtggcgccatctcggctcactgcaacctccgcctcctgggttcaagcgatgctcctgcctcagcctccaagagtagctgggactaggcgcacaccaccacctttttgtgttttcttttagtagagacagggtttcaccacattggccaggctggtcttgaactgctgacttcgtgatccgcccacctcggcctcccaaagtgctgggattacaggacgcccagccagcattgcttttttatctcccattccgtgttacgcagaatgcacttacctttttccttaagttttagtaggttgttgtcttcccctggcctggaatttcattactgtaattgggtagttcccttttgtttttcaaagttatgtttatagttcctattatagctcttttcctctcattatattatcttgcctatgtacttttatatatatgcacaattatttgaatgataattttgggggatttttgcccccatttcttcgtgtctttttatttagaattagatttaagattactcaagttccctttgtttttatttcttctggtctcctgaagtgctgagattacaggcgtgagcctctgcgcctggtcacatttgctttttttttttaagttatgtttcgttttctatgatttactgttgggtgcttcatctttttcttacctgtttgtaagggtgcttcaaatcagcctttacatatgtgttgccagttatattgtcaattatttattgtatatgctgcaaattttttttctgatttgtcatttgtttcttaactttatagtatttattgtatggtggctgttgtatttatttctgtctcctgttatttcattttgacttaggtgctagtcctatgggagtaaatggaggtgtaggagttcaaacgccgagtcttctttctgactcaatgttgcattcagccataaattctcaaaagtaagtcttaacgtgatttataccctgggtcacattacaaatactactggttaacaattcattgtttgacttttgaacttagtttcctcggtttgaggatgtctttgaatacagatagatgtttgagtccattctttcttttttcgctctgtagcccaggctagagtgcagtggcatgatctcagctcactgcaacctctgcctcctggttctggttaaagcaattctcctgcctcagcctcctgagtagctgggattacaggaacacaccaccatgcccagctaatttttgtacttttggtagagacagggtttcactgtgttggccaggctgttcttgaactcctgacctcgcgatccgtctgcctcagtctcccgaagtgctgggattgcaggcgtgagccaccacgcctagcccactctttcttctttctacagccttaatcgaaattgtattgattttctagtgtagcctacaccttccctaatacagtaggatgttgcaaggttacagctccataatagccttatcctgatgttaagaattagtccaccagcctgggcaatatgtcaagacgtcttctctacaagaaaatacaaaaaagttaacggggcatggtggcatgcacctgtagtcccagctactgatgaggctgaggtgggaggagcacttgaggctgggaggtcgaggctctggtgagccgtgattacaccactgcaccctagtctgggtgacagcgagactgtgtctcaaaagataaaaattattattttaaaaagagaggtagtccatcatccaaagcattccctgaggtgagctgtgttaaaatgacagcttagtctgataacacaagccttagaaaactaagtatgggccgagcatggcagctcccctgtaatcccagcactttgggaggccgaggcaggcagattgcttgatcttagaagctcaagaccagcctgggcaacatggcgaaatcctgtctctgctagaaataagaaaattagccgggcatggtggcatccacctgtaatcccagctactcaggaggctgaggcaggagaatcgcttgaaccccggaggcagaggttgcagtgagctgagatcatgccactgcactccagcctgggtgacagagcgacacgccatctcaagaaggaaaaaaaaatggctgggctcagtggctcacgcctgtaatctcagcactttgggaggcccaggtgggtggatcacttgaggtcaggagtttgagaccagcctagccaacatgatgaaaccccatctctactaaaatacaaaattagccggacgtggtggcgggtgcctgtaatcccaccaactcaagaggctgaggcaggagaatcgcttgaacccagaaggcagagattgcagtgatctgggattgcaccactacagtccagcctgggcaacagagcaagactttgtctcaaaaaaaaaaaaaaaaaaaaggcattacagacaaaacccagaaaatgaagtcttatgatatcttgtgttaggacatcatcctgccctccaaagaaatacaacttaccctcacacaggtatgaacatgcacagtttaaaatcagtctagtcacacacttctccctgcctagctccttaatgcgaatagaagtgacatagcatattgattccattacaataatcagtgtcagcttgaattaaatgaggtcttctcctacctttcttcactaaaactatttggtgacccctttttgaagcccaatgatgagtgaaaatgccagtgtgccctccctgggtcctatgccaacagcagctcaaccatccactactggaattcggaaacagtggcacgaagatattactcaggatcttcgaaatcatcttgttcacaaactgtaagtaagattgtggacacgtctcattcgtaaagagatgttacgtcaacatgttttcaatctcctgggcatttaattactaaaggaatattagcaatttttctgtagcatggaggttgatgttgatacttctactcttgtggatttcttgctgctgctgcttttttccttctcaacctttcccaccatcatctatggtagtctttcagctttaatggtatgtgaactattctgtctagtgacagtaaataatatattaaacattgtttttagctattgcctttgcaaaacttatatatctaagaaaaactaggcctcagctcattaaaatattgcattgataacatccttttctgttactcctggtagagcaggggttttttgtttgtttgagatggagtctcactctgttgcccaggctggagtgcagtggcacgatcttggttcactgcagacttcgcctcccaggtgccagtgattctcctgtctcagccgcccaggtagctgggactacaggcacgtgccacctcacctggctaatttttgtatttttagtagagacggggtttcactgtgttggtcacgctgacttcaaattcctgacatcaagtgatccgcctgcctcagcttcccaaagtgctaggattacaggtgtgagccaccacgcctgtcctggtagagcttttattatgtaaaaatctggtagggtggactctctggtcttctcgtcctccagatgtgcacatggcagtttatttttgagaagttgatatatttcaggcactctccccttacgaactccatcttaatctaaagagtttttgtcagatgaaggagggggaggcatatagagcaaggtaatgaaatgtgctcagcatcataaaaaggtagagcttggaccttgccaattacagagtttacccttcaaacaccatgcagtattttttcttggagaagtcttttcatttcactttcagttaatagcagggtcgtctttactgtatccatattttttaattgactgaggaactatttatcattttgtcttaatttatttttatgttatgtcaaactaccaattatatacgtttcatttaggaatttttttttcctcccacgaacccatgcttgctaatcatttaggattctttgtttgtttgtttttgtttttgtttttgagactgagtctttctctgtcgcccaggctggagtgcagtgtcgtgatctcggctggctactgcaacctcccgtctcctgggttcaagcgtttctcctgtctcatcctcccaagtagctggggttacaggtgtttgccaccacacctggctgatatttgtatttttagtagagatggggtttcgccgtgttggccaggctggtctcgaactcctgacctcaggtgatccacctgccttggcctcccaaagggctgggattataggcgttgagccactgtgtccagccaggaattcttcagtggtagcactaagtaacggaatttgacaaggaaagaacttcacaagtttaatgaaattattcctttaataaagaataaccgatctcttattttgtgacagactattcaggaacttttatttaatggacagagatgattatttggggttgatcatttgactttacgttaaaagtttattatatatgctcgagttttctaccaacttggtattattctggacttccatttatatcttcttgatctggttccttcaagtcctatgcaactgagtacgggatgtccaaataaaattagtgcctaaagatcacatttgtcagtcataagagatactagtgcaaaacattttgttagggaattgcatgaaagtgaaaaactgaatctaacagaatcattacgcatttctggtctgtccacttcaggtttttggttttttgtttgttttttataagcctttgtcagaacagttcaagtttttgatgttttaacattttagagtggttactgaattttatttcagtaagctaaataataaatttagaagagcagatggaactctgaaggctacttgatactatgacaaggcctgttttcctcactgtctttagtatgtaacccaaagtaatattttgctttatgtctagagtaacagggaccaaagagtattttttatagagtcatttcttatattgtgaacggaaatatagacaaaaattcttttgtttatcacaaaaagataatttcatttcagtaagtaatatatatcaccttgccattattttttcttttcctctatgtgttcagtgtataaaaatcagaaaaatactaattaaatgctgacatgatattacagtggtaggattttctttttccagcgtccaagccatatttcctacgccggatcctgctgctttaaaagacagacggatggaaaacctagttgcatatgctcggaaagttgaaggggacatgtatgaatctgcaaacaatcgagtgagtgtctggtttttttctattaatagccaagattgaacctgttgtggttattttattcctctttagcatgtacaagtagtacatatgcttcagacgggggacacgctgtagctatcccgtcttattgtccccaagcatagttaggataccaaagcagtttcttaagtgtatgtcatcaagaatcttatgtttttcctcctaatacagtgcactcatgtggcactttatctggttgtcctgtcaacctaaaaagtggctgagctggccgagtgcagtggctcggtgcctgtaatcccagcagtttgaaagtctgaggtgggcggatcacttgagcctaggagttggagaccagcccgggcaacatagcaaaaccccatctctacaaaaaattagccaggcatggtggcacgtgcctgttgtcccagctgctcaaaaggctgaggtgggggaatcaccagagccttggaagtcaagctgcagtgattcgggattgcgctgctggtgacagagggagaccttgtctctctcaaaaacaggagtggggtggtgctgagctgttaccagctgtgttctcttttcactagaatataatgaagtagcgacttaactgttgttcacggtagttcagattctctacataagttgaactttcctttctaaattggcaccagttcttaatgcagcatataaaatgaaactaatatctattctcagtttattttttctgttacctggtggtagttccttttttcctcatctcccttattttacttcaacaattcaaaaggcggaatactaccaccttctagctgagaaaatctataagatccagaaagaactagaagaaaaacgaaggaccagactacagaagcagaacatgctaccaaatgctgcaggcatggttccagtttccatgaatccagggcctaacatgggacagccgcaaccaggaatgacttctagtaagtgttttttgttatatttctgtttgagagaaattgataataaaatagtttctatctaaagtcattaatttctgtaagcttgtgtaactattctagagttttttaaataaccatttgcctttgcaaagaaaataactcatctactagtaaaaacagaagcagaacaagtatatttaagatgtctgggcatggtacttaacataccttgataatctggaattgtttttagagcccaaggtgtaaacttctctaatagtgacatctagaaagcaatagcctacatacagatgttcacagatttctctgagactggcttgtgtggtaagtagccagtaaatgtttgtaggctgaccaggttcaggagccctgtaacacacataatatcatattacactgtcacactttctacttgacataaaatattctaagtctaggaactctttttttttttttctttttctttttttttgaggcagagtctcactccgtcacccaggctggagtacggtggcatgatcttggatcactgcagcctccgcctcccaggttcaagcaattctcccacctcagccttccgagtagctgggattacaggcacatgccaccacgcctgtctaatttttgtatttttcgtagagacagggttttgccatgttggcctagctgatctcaaactcctggcctcaaatgatccgcccaccttggcatcccaaagtactaggattacaggcatgagccaccactccctgcctagaagcatcatttaaaattacattttgacagcttcagtttctgattatagcatcattgttgacctgatgaattaaccagatagccaagactatgataaatagtcttactcaatcgttgacttattggtaggatcaaagtagtgaaatatggagcaggcacaccattttcaggaatggcacaggctgtaagtgctgtgagcaaggctgtgataggaaaaacctgcatttactgagttaggaaatgctaatgacctctaagaagtgccaactgagccagcgggcagtaaacctcatacgatcagtagattataggtgggctgagaagttcatctctttcattcattgaagtagtaaagtagagaaccattggttaccactggcctttagcagcctcatttgctaactgaagtgtgccaggtactgttttgtaatgtgtaaaaagttgggaggagcaacattgctgaggaaatagtatacatggaggctgcccaatagtaaggaaaaacacagattttttgagtagttagaacaaattttcaggaatgaaaaagtcaagattagagttgagactgcttcagtacatgatttggacttgagtagtaactaaagattaaaaaaagtagacaggctgggtgcggtggttcatgcctgtactcccagcactttgggaggccgaggcgggtagatcatgacgtcaggagatggagaccatcctggctaacacggtgaaaccccatctctactaaaaatacaaaacaattagccgggcatggtggcgggcacctgtagtcccagctactcaagaggctgaggcaggagaacagtgtgaacccgggaggcggagcttgcagtgagccgagattgtgcctctgcactccagcctgggcaacagagcgagactctgtctcaaaaaaaaaacaagtggacatacctgagatacttggttttggtagaatttactcaagttctgggtgaagttctgagccaagtttaaagtctgtgagatattaaattgtattctaatgtcagtataaacagtatggtactgatgtaagcaggaataagtggtagtggaactgagtatcagccttaagtatatgttgacctttagctcgtactaaatctgacattttgtagaatgagattcttaccttaacctgatacacagaaaataatagaagcataaaagtggtcgggcatggtggtggctcacgcctgtaatcccagctctttgggaggctgaggctgcagatcacttgagcttaggagttcagaaccagcctgggcaacatggtgaaactctgtctctataaaaaatacaaaaattagccaggcatggaggtgtgtgcctgtagtcccagctactcaggaggatgaggcaggaacatcacttgagcccaggaggtcaaggctgcagtgagctgtgattgtgccactgcacttaagcctggacaacagagtgagatcctgtctttaaataaataaataaggtttgtaaactttgaaaaaacaaaattgaaagaactacgtagaatgttgaagaaaacataacattctcatcttcatgtttctttaacatttgtttttttgttgttggttttgtttttgttttttttttgaaacagtctctctttgtcactcaggctgaagtgcagtggcaccatctaagctcactgcaacctctgcctcccagattcagttgattcttgtacctcagcatccccagcagctggaattacaggcatgcatcaccacacctaactaatgttttgtattttcagtagagacagggtttcacaccatgttggccaacctagtctcgaactcccggcctcaagtgatccgcgtaccttggtcttgcaaagtgctgggattacaggcttgagccatcacacctggccacgtttgatttttttgttttaatacaaagaatacagttattatagaatcagagagtggcaatggcaggactatgtgtattggcctaaaaatatgcccatagtaaacttatgtaacgtgtaccatcttgaaaaaataatcccggttgttaatggagttgaaggtaggtaactctttccttattaattttttgcaaagatacgaagtttcaggaaaagctgatgacagaagtatgcatgttatagtctgagtttttttaagtgtggcatatgccctagaaaaagttctggaagaagtaaatactaatctctgaacatgggcttctgatgggggcagtggaattccaggatacttgtgttgtgtgataaagggtttttgattatttgacttaatgcatacagtttgcattaagggcatatatattgaaatgtgaaagatggacatttttgtttgtgtatattttctttacctctaaatatttatatatatacatttttgagatggggtctgtttcgcccagcctggagtgcagtggtgtgatctcggctcactgcatcctccatgcctcccaagctcaagcaatcctcccacttcagccccccaagtagctgggaccacaggcacacgccaccatgcctggctaatttttttttattttttagtagaaacagggtttctgtatgttgcccagactagtctcgaactcctgagctcaagatatccacccacctcggcctcccaaaatgctgaaattacaggtgtgacccactgcgcccagcctttaaatatttatcttaaaaaatagtatcaagatgttcctttaaataattcatcaagtttccttaaaatgacaagagctgcctcatggagcaataatagatacattcgtatctgcatcatatggggcaaatgtgggcagtaggattgcggttttatttttaaaccattttcatttgattagtctcaaatacttaaaaatcagaagattttgcatttaaaaagtctgaatttctggctgctttaaaaaaaaaaggacatgtctggcagacttgaccccctttctcctacagtgacacctgtctatagctgcactcatggctgactctagaagagctgtgttttctctccacttcagtcctcaccgttctctattgttttgggtacttaaaacagttttacttggtattagctgcttggcacttgccatttagcttggaacacctatccatattgttgacttgaaaaaaaagttactcatatcttaggtgaaaacattgttttgtagatagtgtgcgtgaatacagatatgtgtggggaggaagaggaaaggtttatctcaaggtcatttgttggatcctgattcatttttctattgatttttaatttttatgtaatgagcatggattatgcatatacttcttataaagcttgcagagttacagataaaagtttatatgaataaatgttgagcatttcctctctcagttttgctcatttactaaaggttgaaatttgtctgaagggatggacatctccttagaagagcagcaggtcttcctctcctatgcctgaggcttgaatgtacagcccttgatggagggtatggccagggtggagccaggtcactacagacatctgtcctttcccagggtgctgtaaaaatattttctctgtgcactatgttgaaagtactacactagagcatgtgcagataatccaggaaaaagaccttagaatttatgtatttatattttaggttttttttgagacggagtctcgctctgtcgcccaggctggagtgcagtggcacgatctcagcttactgcaagctccacctcccggggtcatgccccgggttcacgccattctcctgcctcagcctcccgagtagctgggactacaggcgcctgccaccacgcccggctatttttttgtatttttagtagagacgggtttcaccgtgctatctaggatggtctcgatctcctgacctcgtgatccgcccgcctcggcctcccaaagtgctgggattacaggatattttatttttttaagaattatttctgtttttgtatttaagaggtacatgatatgtagtgtggtataatatgcatattatttaaaatcaatgttcacagtttatgtgcataaaaacgttgtgctacatgatcaaattcggccaccattagacatgattcatagctattatccatggagatactctgttgcatgccaaccagactcagactttgttaaacaataacatattaaatgctatgatggcctcaattttttttttttttttttgagacagagtcttgctccatcgcccaggctggagtgcagtcgtgtgatcttggctcactgcaacctccgccttccaggttcatgcgattctcctgcctcagcctcctgagtagctgggattacaggtgcctgccaccacgcctggctaatttttttgtatttttagtagagacagggtttcgccatgttggctaggctggttttgaactcctgacctcaagtgatccacccacctcagcctcccaaagtgccaggattacaggcgtgagccactgtgcctggcctataatggcttcaatagcttatttttctatcaacattgaaagcacccgggctcataaaggaataccaacaaatccacttggaggcatttttctgtattccagaaataacattttcttcaagcttctgtctagttcagagctttattttgtgattcatactcaattttcaaaggtattattaaaaatattttgtggggtttgtgtgtgcagtgagtttttgtttggttaagggaagatggtgcaaagatacttatttctcttttttactctagatggccctctacctgacccaagtatgatccgtggcagtgtgccaaaccagatgatgcctcgaataactccacaatctggtaaatagtgaaaaaaatttttttattttaaaagaatccccggtgtactgcaagataatacttgctacctgaacacccgctttatgccaacagcaagtgtcatgattacctgcccatagaggaagagggggtgaagagcaggttggctggcagatcacagggcaggtgacattaaatgatcaagtatccattaaaaaacaactgcaggctgggcatggtggctcacgcttgtaatcccagcactttgggaggccgaggctggtgtaccacctgaggtcaaagtacgagaccagcctggccaatgtggtgaaaccctgtctctactaaaaatacaaaaaaattagccggttgtagtggcacgggcctgtaatcccatttactctggaggctgaggctggagaatcacttgaacccaggaggcggagtttgcagtgaggcgagatcgcgccactggaccccagcctgagtgacagcaagacttcgtctcaaaaaaaaaaaaaaaagcagattgtaaaatttgtaaaattcagtttggagatcctgttagttgataatgtctgtttactgctactgtgaatgagacagatttatttatacttagaaggttgaaagccagtttattagtcctgatagaatcagggccaggtgcggtggctcacgcctgtaatcccagcactttgggaggctgaggcgggcagatcacaaggtcaggagatagagaccatcctggctaacacagtgaaacccccgtctctactaaaaatacaaaaaattagctgggtgtggtggcggacgcctgtagtcccagctactcaggaggctgaggcaggagaatggtgtgaacccaggtggcagagcttgcagtgagcggagattgcgccactgcactccagcctgggcgacagagcaagactccgtctcaaaaaaaaaaaaagatacagaatcagacataagaattctatcttttattattcaatttcacaaaggcattcagatctaacattttgctcatattcacaggtttgaatcaatttggccagatgagcatggcccagccccctattgtaccccggcaaacccctcctcttcagcaccatggacagttggctcaacctggagctctcaacccggttagtttgacgtctttggtaatctctttggcctttacctggtattttgaaaatcctgtttgttcctactttataaattctcacagtcatttaaacagaccataactcctagttcttctgtaattcttctgtatttaactctactagaaagctgaccaaaaaacgaaaacagccagtcccttgtccctggagtgtcagtgtttagtggcctgcatgcgttttcacggtcacttctcttccctgatgtctgtcttccctcctccaggcagagaactgtcttgcaaggttgatggtgcgtttttgcctggttcttgaactcggagaagagagactaggcttctcctgctccttatgcgaactcttaaccagtccatctctctaccttgaccctaaccctcctgctgccctttagagttagctggtgcctctgattcttgacccttttgggggttcctgagcattactacttctcactaatctgccattttcaacagggagttctgtccttcattttaacctataagacagatggtcttagcttatgaagtttttggcctttggtactcgagatttctttctttaaggcctgaatttgtgtagggtaattttggaaatgacatgtaacagtgctagagcatttgtggaccatgaatgctaccagattctgctacaacttgtaagattttcttgtttttacatattatgggtcttagaatttgtgttattacatcactgacatgacctcatgaaattgtgattaactctcctcacttaacagagcatgcaaagaaaattacctgctatccttgtgctaggcatatttgtgtaccaagagaatgtgtgttccatcctcttactatttcttggagtaggcctaggtaaactgtgaggctatttctctttatcttggcacaagagtcagttgttctacaactttcttccttctcctcttcagccctcttcacctatactcctgtctttggcttttctctacttaataagcctgacgttaggagcatttgatgattttagttatagtagaataactataatgaagcagtttggtgatttgtgttttttttttttttcagcctatgggctatgggcctcgtatgcaacagccttccaaccagggccagttccttcctcagactcagttcccatcacagggaatgaatgtaacaaatatccctttggctccgtccagcggtcaagctccagtgtctcaagtatgtctcataagtggatttttcacttatttttgattcttgaaacttctcttgatgtaggtttttataggagagagtggcagcaaatagtgggtgaaaacagatgattttttaaaaaataacaattttggacttagggtattctgaacatgagattattctgtgacatagcaatggtgttaattgttacaaagtaggaaataatttaaatggatagttttaattgtttttactagtgaacactttaaaataaatcttagaattaaacacaatgtagaaggaaatctggctgaaaagagcataggcaggccctagagcactctgcactcaattctgccatttttctgcggtggctgaggccattctgctgaatggtttgaagtctctttagttaagtactatcttgatggtgctgtccaaagatacatccccagtaatagggtattttacacattttgaaatagacacattgctactctttgtttaatcagtttgtgtcctaaatttatatatcatgcctatgtaagtatttccttaattctgttctgaattgctgtcttgttatgttttttattttaacaggcacaaatgtctagttcttcctgcccggtgaactctcctataatgcctccagggtctcaggggagccacattcactgtccccagcttcctcaaccagctcttcatcagaattcaccctcgcctgtacctagtcgtacccccacccctcaccatactcccccaagcataggggctcagcagccaccagcaacaacaattccagcccctgttcctacacctcctgccatgccacctgggccacagtcccaggctctacatccccctccaaggcagacacctacaccaccaacaacacaacttccccaacaagtgcagccttcacttcctgctgcaccttctgctgaccagccccagcagcagcctcgctcacagcagagcacagcagcgtctgttcctaccccaacagcaccgctgcttcctccgcagcctgcaactccagtaagtagagatttggatttaggcagaatcattagagctatactgtagtattatattacttctgggccatttccattctcttttgctttatctcttactgttttctccacaagtagaatgtaatctatttttcattagggacttttgtatcctgttttgccttcctgtgatagtacctatcgtagcaggagcataaagattttatttagctctgactttgaccattatgtttcatgttgtaccctgaggtctgaaggtacgtaaaggggtacgacaaggggacacaatccttctccttatttagtatattatttagtgcagcacataaattttacatatatttaaggaatctttttcaaacagtttgagccataaaacctagagattgaatttaaaaattgcagatttggacgggcgcggtggtgtacacttttcatcctagcactttgggaggctgtggcaggcagatcacttgaggtcaggagttcaagaccagcctggccaacatggtgaaaccctgtctctacaaaaaaataacaaaaattagccagacatggtagcgggtgcctgtaatcccagctactcgggagactgaggcaggagaatggcttgaacctgggaggtggaggttgcagtgatccgagattgcgccactgcactctagcctaggcgacagagtgaaactccgtctaaaaaaaaaaaaaaaaattgcagatttatgagtccttgtggcccaaaccaaagtttaaaaataagatgagagaattatagacccagaacaacctgtagcttccttgtgagaggttggttatgtatataataaaaatccaaattctcatctaatagttgaatccttattaatagaactttttttaagggtttagaagcttctactttgataccgatattaatatatatcggtatccaatagttctcagccatgttgatgaactgagaagttccatgagtcacagccgttttataaagtactgtacttgacggatggctggttcatcgtggcctctgatagacaaggaaggacagaatgagagaggaaccagtggatctgcttgattttattctttataaaatcaaggatacttccagaaaatactgacttctcattaagagatttcttatgacaagccttaggataaagatagggaatgccagtttatctcattagaatctagcgattcaaaacagccactctctgggacatcattatatttattgtctccttttctgtacctttgaaactttctctggtgagaaggtaaaaacaagccagtctttcttattttctttcactcatttctgtataaatgtgagctcctctgaagcagacatctttgaaatccccacacactgccagataatgatagttatcaatgaaatagttgctggttctttgatgtacaatcagccaaccagtatttacaagtcttaattctcctgttcttaagcataattaagggaggtgaaatgggcagagcaaatgaaagcaccatgaataaatataagccaagaaataggtggctaattctgctatcctgttgcttaccttacattctgattgtatcgttggcagactctgcgtgtgtctcacctacttcccttttttttctgcccagctttcccagccagctgtaagcattgaaggacaggtatcaaatcctccatctactagtagcacagaagtgaattctcaggccattgctgagaagcagccttcccaggaagtgaagatggaggccaaaatggaagtggatcaaccagaaccagcagatactcagccggaggatatttcagaggtgagagtagggcaattactgtttgatttggttaggacctcagtataggaacccaagttttaaaaaatattgcagaaaaatattttgataattagatctcatggcatagattttgcatgagaaagggtgttcagattactgattcccaactagatatctttggaatactaaaaattcttacgttttcttttagtctaaagtggaagactgtaaaatggaatctaccgaaacagaagagagaagcactgagttaaaaactgaaataaaagaggaggaagaccagccaagtacttcagctacccagtcatctccggctccaggacagtcaaagaaaaagagtgagtctctgaagccattcgttctggaggtagctgaagaaaccaaagacccagggcagaattgcggtcatgcctcttgggcctcagaagttgccattattgtgatttcattaacctggaagccctgggcctggtctcttcattgttactaataatttttctttcttttttttttttttaatattcacttgcagcaaccaatgagttaagtcattcccctcatttcttcagggttccctgtgttagtacaccctaaaaattgtctcatttttcaggagagagaaatgtttgtaaatagccttgactaaaatgcaggaaagaatagcaatagtaatagcatttgtcattcacctgctgtgtgctaagtatccacattgtctcatttaataatttctttctttctttttcttttcttttttgttttggaatcggattctcacttttgttgttcaggctggagtgcagtggcgggatctgagctcactgcaacctccacctcccaggttcaagcgattctcctgcctcagcctcccgagtatctgggactgcatgcgcatgccaccatgcccgtctaatttttgtatttttagtagagacaggatttcaccgtgttggccaggatggtctcgatctcttgacctggtgatccacccgcctcgagctcccaaagtgctgggattacaggcatgagctaccacacccggcctcatttaataatttcacaacagctctgaggttattggcctgaagcttagcaaagttaagtaactttccacaggttactcagctgaccctactgcctgggccaggaagcagacccaggcagtctgaggcagagtgctcaaatccagccattccaacaagtgttaattgactattttaggactagaacttttgtggctctagtgatctgcaaaaggcaccaggtaggacatacctgaggggtgagtctgctggctcttacagatgatatatattgaaaagtgttccattaatacaatgtgttgtaaaatgttgggattaaaaaattattttcattttaaaaataagacttgtatatattgaggtgttttaatatgggctgtaacaaacccagtcttactattggcaatctctctttaaaatgtgtgttccctcatgcctgtaatcccaccgctttgggaggccgagcgggcagatcacttgaggtcaggagttcaagaccagcctggccaatatggtgaaactctgtctctactaaaagtacaaaagttagccgggtgtggtggctctcacccgtagtcccatctacttgggaggctgaggcagaagaatcacttgaacccgggagatggaaggaggttgcagtgagccaagatggcgccactgcactccagcctgagtgacagagagtaattgtctcaaacaaataaataaaataaaatgtctaatttcacaagtttattcaaatagtccttatttttagcacagctaaatatgagtgacaagcatcttcgtagtctggtttccccccactccatggcaaccccccagaggtgaaaattatctgaagtaacaaatatactctaccgatgatgaaattttttttgccaattaagaaaaaataaggcccttgctgaaattgaaagctttttaaatcactggcttctcaaagaactgtttgattccatttgggacacaccaacaaatttttccggactttttgggaaatatcattgagaacacatttgaacttaatttgatcaactaagtctattattttagcaataccatttttgttctctcttcttttaaacttaaacctaacatttgtcattaaaatagtacatgtctctttttctttggctctaaaataccaagcatttgaacgaaggagtcttctcttctgtgcccctgactccttgtagtataagacaatacctgatctagtctagtttctgacttgttaaatactgatgtcatgaagaaagacttttctgttcttgcttgactgcatctccctcttaacacgagtatcttgtgcactcttttttttttttttttttttttgagatggggcctcattctgttgcctaggctggagtgcagtggcgccatctcggctcactgcaacatctgcctcccgagttcaagcagttctcttgcctcaagcctcctgagtagctgagactagcatgccaccatgtccgactaattttttatatttttagtagagacgaggtttcaccatgttggccaggctgaaacttctgacctcaaagtgatctgcccacctcagcctccaccgtgcctggtcccatggactcttatttggcaaagtctcttcataaatttttagaagcctttggattctgcttctaattgaccgagtctgtcttcactgactttgtgactgaaaagttaagctgagggtgaagagtgttttaaggtgataagacacaatgttttttaggagctgtctgaaacaaagcggggcttagaatctagaatcagtgattgagcctgtagtgatatttccatggggacagagtggttaattttgttattgattcttgagatgcttttagagcttcaggctgaatgattttttaaagttcttctgcttaattggtaactaatttcaaatgcactttttttttttaagttttcaaaccagaagaactacgacaggcactgatgccaactttggaggcactttaccgtcaggatccagaatcccttccctttcgtcaacctgtggaccctcagcttttaggaatccctgtaagtatttggtggtacttttgattttattttttaatttgataacagctttattgagagataattcacattccaaacagtatagccactcatttcaaatttgtaattcagtgattttttttttttccccctgagacagggtcttattctggttgcctaggctggagtgcagtggcacgatcgtggctcactactgtctccacctcccgggctcaggtgattctcccacctcagcatcctgagtagctgggataactacattcatgtgccacctcacctggctagttttttgtattttttagtagagacggggtttcgccatgttgcccaggctggtcttgaacgcctggactcaagcaataggcccatctcagcctcccagagtgctggaattacaggtgtgagccactgggcctggcctaattcagggagttttagtatattcacagagttgtgcatgacactttcattttcatcatctgaaaaaaatcctttaccattaacagtcactcactattttctcccatagcaccccaatcctagacatcaccagactgcattctgtctctggatttgtctgttctacatgtttcattaaattggaacatacagtatgtgattctttgtgccaggacgttccttagcataatgttttcaaggttcatccatgttgtagcatgaatcagtagcacatacctatttatagcccaataatattccattatttttctttacctgttgatgagttgatagacatttaggttgtttacacgttttgactattaagataggactgtagtgaacattgtgtggatttaagtttttatttctccttggtatttacctaggagtggaattcctgggttatatagtttgtttacttttttgttgttgttatttgttttttgtttttttgagatggagtttcactcttgttgcccaggctagagtgcaatggcgcaatctcagttcacctcaacctccccctcccgggttcaagcagttctcctacctctcagcctcccgagtagctgggattacaggcatgtgccaccatgcccggctaattttgtatttttagtagagatggggtttctgtatgttggtcaggctggtctcaaactcccaacctcagatgatccacccacctcggcctcccagaatgcccagattacaggcgtgagccaccgcacccggccactttcgttgtttcaagagcaataggtcatagcagaaaaaaggaccgtggttagctttgtttttaaagttgcctccatatactaggctgctggcagatttcatttggtggttttaaactgttacttggccgggcacggtggctaacgcctgtaatcccaacacttttggaggccaaggcaggcagatcacttgagttcaggagttggagaccagcctcaccaacatggtgaaaccccatctctactaaaaatataaaaagtaactgggcgtggtggtgcacgcctgtaatcctggctacttgggaggctgaggcaggtgaatagtttgaacgaccctgggaggcagaggttgcactgagccaagattgcaccactgcactccagcctgggcaacatgttgacagagactccatctcaaaggtcaagtgcttccaggggcaaaagccttttaggacttttcctctcttgtatcttgctgtgatttcagatggaacattttaagttctgtgggcttagtttcctcattgtacaccccttctagtactaaaattttaaatgtctttgactttactgatctcacatgtactttcataaagaacctgaagttgcttcagtagaatatcagcctgatgtctagaaagtccatagtagttctgtttctctgccctttgagtagtttaatatctctgtaaactaatatttaaagaagtgatggacatcagtcacctcttggggaatatagacaggccagaaactaaaacactgcctggaaaattaacaatgataatggatgatactccatctcccgtaaaaatagtgagacttgagtaatgtttgatgtcacttgtctttctaggattactttgatattgtgaagagccccatggatctttctaccattaagaggaagttagacactggacagtatcaggagccctggcagtatgtcgatgatatttggcttatgttcaataatgcctggttatataaccggaaaacatcacgggtatacaaatactgctccaagctctctgaggtctttgaacaagaaattgacccagtgatgcaaagccttggatactgttgtggcagaaaggtaagaaatgtgtttcagatttgactttaacttttctgggatacctagaataatatagtggtgactgggataagagaatatcctgcttctggctttgacatggcttttttttttttttttttttttcctttttgacagggtcttattctcccaggctggagtgcagtggtgaggtcatagctcactgcagcttcaacctcctgggctcaagcaattctcccacctcagcctcctgagcagctgggactacagccgtacgccaccatgcctggctgattttttaaatttgttttgtagaaacagggtctcatgatgttgctcaggctagtcttgaactcctgggctcaagcagtcctcctgcctcggcctcccaaagtgctggaattacagtcatgagccacctctcccagccaacacagtctttctcttactgtgtgccacagtagtaatatctcttaatatgaaatgggctttctttaaaggcattttttcagagtggcaattgtatggaaaagttgactaattaaataatcaacagactgttaactcatctggagtaggggcattcttatattcacctgtgggtgcagattcctcagcatgtgctggctttcctgtacataccaattcacattattggttttttgtttttaaaataagactatggtcttgctgtgttgcctaagctggtctggaactcttgggctcacgcagtcttcccacctcagcttctgagcactgcaggcatgtgccaccctgcccagctattcctgttaggttctttggtaaagtgatggaaggatatgactgctaagcctacctcagcgttttgaaataatgtggtagtaaactgagaatgattttcaggaactgaattagcccatcattattaacataaatgagaactaagacaccactgacttctgtttctgacttgccattcttactgttctagcttgtccttaaggcctctgtgctttttaacaaatggtttcttttgcagttggagttctctccacagacactgtgttgctacggcaaacagttgtgcacaatacctcgtgatgccacttattacagttaccagaacaggtaagcttggccaggtgtggaccatggtccatgtgtccacatgtccagggagtgcatgcggatgggccagcacacatacagtcatggttcatgtgtatcttgcttgaagacagctgtatagcacaagttctgttttttgccttctgcctttgtttgcagaacaataaaattttctatcagagtagccttgcatcagttacctgggttcctcccaagagcttgagaagttaagcaactttgtgagttgttggcctagatgggtctatatcccaggccccacttctctttctactgtgtgtttgttgatcaccacagcctgaggcaaaactgagaagatttttaaacttttaactgaaactcgctagacagctttttggaaatatttcctttttagatgaggcctatccctaagtagttgttattagaatatatgaaaacaggattctggagtcttttctttgcctcatattaagcaaattaaaaggaaaacctcacatagctctctgtaccttacttttcccaacccagccttgtatgtgacagaggatgatttgagtctaataaacgaggcacctctgcctaattttctcctgcccaatcaatggctgtaatcacataaatctcattcactaatctatcttaaccacaatttgtctcctgttttcagtgatcagctacaagtatagcttgcattgggtgtttatttggggctctgatacaataataacaaggctggatgatattaataccctttatttgtttgttaataccaaatccatggtgttggtttttgctgaacttgtgtgttgcagatgcatttctagctttgaaaagtcacttaaactttttcttttatttacaaaaagttaggcgtgcttctaatgctttgtagacctaatgctttgattttgcagtgagtaaaaatctagctctttactcatttgaaacctagaaaaggtgggactcaagttgttataagtaccttatgtttaaaaaagcaagtaactggacatgaaacttttctcatgtttactaaaacagtagtctaaagtgtttatctttgcaccaagccatctttaatcaggtacctgcacacatcatttccttttgaaatgtatcacttgatggctgtagtcagtatttaactgcttgtgcaggcttttcaataaacagttttttttctttctttgttgagacagggtctcactctgtcactcaggctggagtgcagtggcgcaatcttagctcactgcaacctctgcctcccgggttcaagcgattctcctgcctcagccttccaaatagttgggattacaggtgtgtgccaccatgccttgcttatttttgtatttttagtagagacagggtttcagcatgttggccaggctggtctcgatctcctgacctcagatgatccaccctctcagccttccaaagtgctaggattataggtatgagccaccacgcctggcaatggttgttttagattattgttttctgcagttgtatctatagtgggcttttggggtggggggtgggggtctgtggttttttgttttgtaagtgggaagaggtgtgattcctgtatttaggtaatgagtagcagttcttctctccctggtatatttatccttcttcctccttttgattatttacatcacatagcgttaattgctgaaatgaaaggatatgggtctgtgtaattgaaacatttgcttttatttgcagtaatcatttgctacttgtgatcccatttgagatatttaatgctaatctgtgctttgccttggctttctgctttgtgttgttctgtcttgcttttatgttttttgttgtcttgcaatccctcatttcttcgtttgttttgtgtttttttttctccctcatgcttgtcgttgtctgcacttggctttgattgcaaaaaaaaaaacaaaaaaaaacaaaaaaacaaacaaaaaaaccaaaacccaaactgtggggcccatatatctgcatcattgaatgtccttgtcgccgttgatgacctgctctctgctcccgtccccctccttggcctgctgtgattggtggcttcgttgcttggcttgggctgtgttgtgtgaacggaacagttcaccccagtatggccttcttgccgacaggtatcatttctgtgagaagtgtttcaatgagatccaaggggagagcgtttctttgggggatgacccttcccagcctcaaacgtaagtaactgcattattttgaaaagtgctaattagtttgttgtccagtgattatgcacagcttatttctaaatgaacttaagctatgctgttgaatatggtagccattagccacatgttgctatttaaatgcatattaatttaaataaaaattgtttatcacatggaatactcacatttcaactgttcagtagctatctgtgtctggtggctaccatattggtcaacacagagaacatatccatcatagtagaaagctctttgagacatcaatgaattagggaatatgtcagcaatgggcaatcatcttagttctagtaaaagtattctgtataggaagcaatcagcttctcttcgaaaaattggaggttagtacaagaaaacatcattattaactgttctgagtttgagggtgattgaactgatgaccaccttacacccttctcttgtaggttaacagaagacccaagtcactattgtagtgaataatagactttaacagcatgccggggtttaagagatttgcttgtgctttgcagtctcacaagctcttaccatttggtaaatggccaagaaaaaaatttcaaacatatagtctaatagtttaatctctggccaggcgtggtggctcatgcctgtcatctcagcactttgggaggccaaggcgggcggatcacgaggtcaggagatcgagaccatcctggctaacacggtgaagccctgtctctactaaaaatacaaaaaattagccgggcatggtggtgggcgcctgtagtcccagctactcgggaggctgaggcaggagaacggcgtgaacccgggaggtggagcttgcagtgagctgagattgggccactgcattccagcctgggcgacagagcgagagtctgtctcaaaataaataaaagaaaaaaagaaaaaagtaacttaagatgtaggcagtcattagaattcaaactgggactgtctaagaaggaaaaactgttcagtgtaattttaatattattgaaagttcatatttacttctgttcaggacgttgcacaaaaatttggaattctcttgttcctagtaaaaatggggcttctgagaaaagctggttaatttttctaaattgcgttctaaagatagcagtgtctgggtgctagctaggagagtagatactaggagcctttgatccttgaaacattttgacatttggttaagccaggaaggttagctctagggtaagtttccttgatgcaggaagagacgtaagccttgtcattgaactctcaggtggcttaccaaatagtctaaaccttaaggcagtacatctctaactttgaaaagagtaggaacaagacccttcccaattctgcaggcctgtagtggatccaagtgtctatttctaactcccagattgttctggtgctgctcatcttcagattgcacttggagtagcaagacaggccattcaggaaaatgctattaacagagatgaatgaatctctaggccataactagtgtaagaaacggttttcaatgtggacatgtcctcatttttgtaaggaagtataacagaagtccaagttggtccccctaatgttgattctagttggagaatgtggatcctagttggagaatggtaagactgttagcttttgtatgtagtgaggctatgagcagtgtgttatgctgggtttcaggatgggaagccatgatacctaacaccaagaatagtaacagacaagattttaaaaggaaaagaagaaacagtatttctagttcttcctgggttctccatttctgataagaggaaatttatttactatgaagtcctatagaatattcctttacataaacatgcattttgtgtgagccaagaatacacctatttaaatgtgtattcttaaaaaacctgaatctctatatagggtgaagtttgttcctttggttagaacagcagtcagattgctcatctctatcactttttctcattgtgtcccttttctctccttagtacaataaataaagaacaattttccaagagaaaaaatgacacactggatcctgaactgtaagtacgatccccttgaatagtcagtacgctttggcttttctttttccctttcattctcttgaagtttgcatgaccaatcagatgatcctatattcttgggctaaatctacataacatacatctaatggatagtaaaaccatggaaaacactgaagtactaaggaacattatttcttaatgttaattttaatgttcttaatgttgaatgtgaaacattaaagatctaaacttctagtttgcagtgaggccttttagatcatggaggactgacatgtatgtcttctagatgttcctaaaatggatgggatggtatttggatttatttggaattttcagcaccaggaatctgtcttaaaaattagccaggttttggccgggcacggtggctcacgcctgtaatcccagcactttgggaggccgaggcgggcagatcacgaggtcaggagatcgagaccatcccggctaaaacggtgaaaccccgtctctactaaaaatacaaaaaattagccgggcgtagtggcgggcgcctgtagtcccagctacttgggaggctgaggcaggagaatggcgtgaacctgggaggcggagcttgcagtgagccgagatcccgccactgcactccagcctgggcgacagagcgagactccgtctcaaaaaaaaaaaaaaaaaaaaattagccaggtttggccgggcacagtggcccacatctgtaatcccagcactttgggaggccaaggcaggatcacccaaggtcaagagttcgagaccagcctggccaacatggcaaaatcccgtctctactacaaatatataaattagctgtgcgtggtggtgcgcgcctgtaatcccagctactcgggaggctgaggcaggagaatcgctggaacccgggaggcaggggttgaagtgagctgatatgacgccactgcactccagcctgggcgacacagagagactccatctcagaaaacaaaacaaaaaacagccaggcatgatagtatgtgcctatcctagccaggtagctgagaggccaaggcaggaaaatggcttgagcccaggagtttaaggttgtagtgagctgtgatcatgccacccactccagcctgtacaacagagaccctatctctaaaaaaatagaaactttattaaaactattttcagttctttggtcatgaccttggctgtctttgtcagaagtcatgggaaatattgcaagttttcatttggttaaggtttggggttaattttggaattggctctgctcttccaggtttgttgaatgtacagagtgcggaagaaagatgcatcagatctgtgtccttcaccatgagatcatctggcctgctgggtaagtcttaacgttgttactttctctggaatttttctttatcgtgaatattaacaagttttttattctatgcaattgactgtattatatcttcaaagttactatctttaaattgttttctttgggtttggccacgataattatagttcgctttttaaaaattaagtaacctagtatccaaaaatagatttttatcttatttttatgcattcttcttagccatataaatatattttattctgctggattgtttattaaaattatattgtagttattacacatcaaaagtaaatatttatggccaggcgaggtggctcacgcctgtaatcccagcactttgggaggccgaggcgggcggatcacctgaggacaggggttccagaccagcctgaccaacatggcaaaacctcgtgtctactgaaaatacaaaaattagcctggcgtggtggtgcacgcctgtaatccagctactcaggagggaggctgagggaagagaatcacttgaacctgtgagggggaggttgcagtgagctgagatcacgccactgcactccagcctgggtgacagagtgagactctgtctcaaagaaaaaagtaaatgcttttgttccggcatctagaaactaggatcatgctgctggcatgaataggtctggccctggtaagggtcaccatttggttagggcaggaacagcaagttataaggctgcagtcatagtgtaattgcctagtaaaagggaggggccatcgctctgtacaagaggaactaatcccagccatgttccaaaggaagcgggtatatgggacatccagtgcctctcattaagatgggatctccatctcttctgctctgttcttgggctgattgttgttcctgatttggaggttacaagaaagggcaggctaattgacagatttcacttttctttttttcaccgttattttcacatagaaaataacactaaggaaaataggtgatggtttagtggatactttattttcagtgtgacttgtcttttaagtgtgcctttttagtgctttccttaacagatttcgtaagaatgattaagagacttcttgtggttcttctaatttaggatcagtcaactgaatgaaaataatctgttattactgtgttaagcttgctttttcttaaaagtaatttatgttcattataaaatttgaatagtatgacagtttatgaagtaaaaagcgacggtctcagcttctctcttcccacccagattcctcactacaggaataacactcttttgtacatacaatcatacattttctttttttctttttttgagacagagtttcgctcttgttgcccaggctggagtgcagtggcgcgatctcggctcactgcaacctctgcctcccaggttcaagtgattctcctgcctcagcctccctagtagctgggattataggtgtgtgccaccatgcccggctaatttttgtattttggtagagacagggtttcatcatattggtcaggctggtcttgaactcccgacctcaggtgatccacccacctcggcctcccgaagtgctgggattacagcatgagccactgcacctggcacattttcttgatttatgtgtatttaatttttaatttttgtattttgttataagtcatagacttttttaattgagtctcactttcatcacccaggctggagtgcaatggtgtgatctcagctcactgcaacctccacctcctgggttcaggcaattctcctgcctcagcctctcctgcctcagcctctcgagtagctgggattacaggcacataccaccatgtctgaccaattcttgtatttttactagagacagggtttcattatgttggtcagggtggtcttgaactcctgacctcaaaagatccacccacctcgacctcccaaagtactgggattacaggcgggagccaccacgcctggctggtcatagacactcatttatgtctgctgcatttttaatggatgcatagtattctgtaacatactataatccatttatttacttggttgatgaacaagtttatacaagaaactacttaggagacaaatatcatgtgcatttgcagtagctgaatctattggttctactctcaaaatgtactttccaactagtagcatataggaaatgtcacctcttaggatttttctcccctatcacattagcaaaacctatcttgatttgtaatccttgatcatcttttcctgtgtaaaccaatttatatgcccttcatgtttcttcatgtctgttgcttgattttcaattatcttttttattcttactgatttctaaaagctctttgtgtattagttttattaactcttcattagaaatttagaaatacttctgctagattgtcttttgaattttaactttttgttagtataaattcaacggtttatctaagttgtgtaagcaaagttttggtttacatttagattcgtctgtgatggctgtttaaagaaaagtgcacgaactaggaaagaaaataagttttctgctaaaagtaagttttattcttaaaggtaaattttggcaaaacttatctgaagcctagataagaaaccatccaaagtgaattactttgtttttaatcacagtaatagagtaaaaataaaataattctataatctccttatagttgatctgtaatatattttttggtgtgaaatttattagaccaaagaaaaaaatttccaaggaacggatttgtagaatgcacaagatacgtgtttttcctgttcctatatttttccctatttggggcatttcataaaggaggaataaggtgtggaaatgattggccggaattgccatctctcagtttgtttatttattattttttattttattttttgagagtctcactctgtcccccaggctgcacagtgcagtggcacgatctcagctcactgcaacctccgcctcccaggttcatgtgatttttctgtcttagcctccagtgtagctgggactacaggcatgtgcctccacacccagctaatttttgtaatttattagagatggcgttttgccatgttggccaggctgatctcaaactcctgatcacaggtgatccacccaccttggcctcccaaagtactgggattacaggcgtgaaccaccatgcccaacccctcagttcacaccatttatatgggctaccttttggccttatgtgattgttttctactgtgccaggaggatgtcaaaaattttatcatgtaagtaattaacactaataatctaaatgtagtatttgatttagttttggggtgttttactgatctacagattattttgattcttgtaaggtttctcaaaatgctcaaccttcgttactttaaaatattactgcaatctaggcaaagtacatagagatgttcattgtttatatatttgtgtgtgtgtgtgtgtgtgtgtgtatatatatatatatatatatatatatatatatatatatatatatatatataatgtttggttggttgggttttttgttttttggaaacaaggtttcactgtgttgtccaggctgatcttgaactcctggattcaagcaatcctcccacctcagcctcccaaagtacaaggattaggattatgggtgtgagccttgtctcctggccattgttctatttctgtttgtttttgtttttttttttgtttttttttttttttttttttttttgagacagagtctcgctgtcgcccatagtggcgcagtctcagctcactgcagcctctgcctcccgggttcaagcgattctcgtgcctcagcctcccaagtagctggaattacaggcgtgcaccaccatgcctggctaatttttgtatttttagtagagacggggtttcagcatgttggccaggctggtctcgaactcctgacctcaggtgatgcgcccacctcagcctcccaaagtgctgggattacaggcatgagctaccgcacccggcccctgttctgtatttttataaactcttccaaaattggaaatttttcaaaatgagaagttggggaaaatgatatttagaaattattgagtactgtgtctgctttaatagcacatgtattaaaattagaatgatatgaagattagcatgttccctgcactcatatgacatgtaaatctgcaaagtagtgactactttgctatgattttttaaaatttcaccaagttatcctgtttgtattgaaaaaagtacaaatgagatttgaggttgaaccttaagactaacaacagtaaatttgcacctcagtaacttttaacttttacattcctagggttgccatctaccagacttggcacctttctagagaatcgtgtgaatgactttctgaggcgacagaatcaccctgagtcaggagaggtcactgttagagtagttcatgcttctgacaaaaccgtggaagtaaaaccaggcatgaaagcaaggtatctagtcatttcacttttcttctcctcgtggatccaaaattgctcatacatggttactattggtgattccagtctgaatgagttatgttgtggttcccccaccatctcaattgtataggtttgtggacagtggagagatggcagaatcctttccataccgaaccaaagccctctttgcctttgaagaaattgatggtgttgacctgtgcttctttggcatgcatgttcaagagtatggctctgactgccctccacccaaccagaggtatgactagctcacagtggctagctccggatttgtgtgggagttccaacttataataggtggaaaagcataacaggcaagaaaatgtttagtgtgtttggtttggaaatgcaaaatctcaagtgtccagtaattttaaagtgaaacagattaaaaagcaaacccccaaacaaaataaccgctcaatactgctcttctgtggtcatagtaataaaggatatgaatagcaacctgaaattggaatttgaaaacaaacgtactactcttcagaaaatgagcttaaatctggattaagtagctatgtgaaaatatatcatacaaatcgggtgggaatttcttttctccaaaaatagtataaaggcaataataaaaacgtatagggatcaccaaatactgattgatgtgtatgtgccaggcactgctagttactacaaatagaaggaaaccacaggctcactgaacttccctgaagggttcacggcggagtcgcctacctgcctgtgatgagcttcacaaataacgatgtgagcaaagagcctgggagagtgagagggtgttattaggcacatggagtaaagaactcattatgtgacctgactttttttttcctcttcatttctcttcattttgtataggagagtatacatatcttacctcgatagtgttcatttcttccgtcctaaatgcttgaggactgcagtctatcatgaaatcctaattggatatttagaatatgtcaagaaattagggtaagcatattttgataatggctttttttctttaactagcatggcattctggtgagatataggttaaatatgcaaatatataactcttggcctttttttcctcattttagttcttacgtaacaattctcttaactttgttggagcccctttgaagttaatgtcagtagagagaaatggatatgttggccctagtttcacccatccaacattagttttgtttgtaagctaagccattgggtccactttgctttgaagtttgatttgtgcccctcatttgagggcagaattttaactgcatttgatccttttacaacctgggtatgaagaccaaaaacagttctggagatacttcttacctttagagtatgtatgtcattggaaacattcactccctcatcttgaagtctgtttctctgaacagtgtgccttttaatttagctcttgttaaatgggtccattttcctttgcagtgtaatcttcatttggtcttaacatgcagacttagggtttttggatccagggctaagtcacccacttcgtggctgagattcgcaacatcccaccatggcctccaaaaataagtaggcaatatgagatccattgttactactgtgagttatgcctaattttggcctcacaatgttaatctcattctgggttatatatacactgtgttatcttgggaaaaattattggtatctatatcaactccaacttgtggtttaaaatgtagccttctagaatagattatctcttttccttaatgttctttctctttgtattgttagttacacaacagggcatatttgggcatgtccaccaagtgagggagatgattatatcttccattgccatcctcctgaccagaagatacccaagcccaagcgactgcaggaatggtacaaaaaaatgcttgacaaggctgtatcagagcgtattgtccatgactacaaggtcagttgggacataggggccaggtgctgacaatagatctggaaatgcactaatgttgctgctctttgttctgtcatttaacttttttttttttttttttttttttttgagacggagtctcgctctgtcacgcaggctggagtgcagtgacacgattttggctcacttcaagctccgcctcctgggttcatgccattctcctgcctcagcctcctgagtagctgggactacaggctcctgccatcacgcccggctaaatttttttgtatttttagtagagacggggtttcactgtgttagccaggatggtctcgatctcctgaccttgtgatccgcccgccttggcctcccaaagtgctgggattacaggcatgagccaccgtgcccagccttttttttttttttttaaacaaaagtcttgcttgttctacctcttgcatgtaattcctaaaaatgctaatttgattgcttttattttgtatattcaaaatttttcaatataagaaaaaccaggttttgaagagcggtagatcaagaaatccctgttttaaacatgtaaccaaaattttattttatttatttttggggggagggtggggatagagttggggtatcgccatgctgcccaggctggacttgaactcttggcctcaagcattccaaagtgctgggattacaggcatgagccactgtgcccggccttaaaatatatctttttgttttggttttttgttggtttggtttgggttggttagggttttaggggtgtgggtgttttgttttcagaaagggtcactctctgtcacccaggctagggtgcagtggcatgatacccgctcattgcaacctgtgcctcccaggctcaagccatcctcccatctcagcttcctgagttgctgggactaggtgcacactacgagagctagctgatttttgtatattttttgtagagacaggatttcaccatgttgcccaggctggtctcaaactcctgagctcaagtgatctgcccacctcagcctcccaaagtgctaggattataggcatgagccacatcacccagccaaaaatatattctcccttttttttttttggacggagtttcaggctggagtgcaatggtgcagtctcctgggttcaagtgattgtcctacctcagcctcccgagtagctgggattacaggcatgcaccaccaagccaggctaattttttctatttttagtagagacggggtttctccacattggtcaggctggtctcgaactcctgacctcaggtgatccacctgcctcggcctcccaaagtgctgggattacaggtgtgagtcactgcacctggccaaaaatatattcttaattaacagtattatgttattcataaatataggttgtctcatgatacagacttgtcttcctcaatttagtagttcaactaaataaagaagttttcctaagcagcccagcaaatcattctgcagcagatactatttccagtatttgtagttttggtcattttgaacaaagctgtcagtaaaagctgctgaaattccaaggatgggtgtgaggagggcatgcttcataccacatattctgtgataaggagtggtaggggccatggcatgcatgatggtgctaccaccctgacgttgatcctgtcaggataattgccacttggttatataaaggcagataagctccctgtttttgtgggtagaagaaatagaaaaccggaaatattgactttaggccaggccttttcactatttatttttctaaatactccctggcttacggcttaggtataaagtctctgccagctttcaagacattttaagctttcatgtttcttgtcagccatgattattctgtataatcaatgctttaaaagaacatagaaattcctatatgtacatgcatgttttcacaggatatttttaaacaagctactgaagatagattaacaagtgcaaaggaattgccttatttcgagggtgatttctggcccaatgttctggaagaaagcattaaggaactggaacaggaggaagaagagagaaaacgagaggaaaacaccagcaatgaaagcacagatgtaagggcattgagtttcctttgaaacttctatcatgattctaatatttaatccagaagtgcacttaaactttcaattgggttttaaagctttcaggtgtaaaagagctctttaagttggacaagaaatattggcttagagaggttattagggttctgtttcagtggtattaaacttttaaagcatcagagccccttttaaaatggcatctcagactttgagtaatgtgaaatgataaaagaaactgaaggaaatcctgaaaaactgatagaagattacttatctgaaggactaggttatgaatattataggccttgtgggtcacatatctctggcatattttctgtcttttaaaaacacactctttttaaatgtaaaaaaccattcttagctatacaaaataggcctgagccagaatttaagttactaagcctggcttagtaacctcaccagttatttccccatagcatatctcgaattacctccattgaatttaacttaacaaaaggcacccttaaatagtctgttaacaaactcttacagccttgtcatttagtatttgtaggctcataacattttagaatatgagtggaaggaaataaaaccaaggtcttctggctccccactttgatacactcttcactaccccaaagtgccaccccttccttgttccctagccccaatctgggatacattcaatcaatctacagggtctgcacattctgtggcctcttctaggcaaaaagctaaagggctgccattgccttaaagatcactgggagaaaattaggtcaaataacaactttaaggagaaagaataagtgaagagaacagctagtaaaataagttacaggcataagattatgatatctagtttcaaagaagggagatattctgtgctattcccaaattacttaacaaaaaccttattttcttgtctcctttgtgctactctgcaggtgaccaagggagacagcaaaaatgctaaaaagaagaataataagaaaaccagcaaaaataagagcagcctgagtaggggcaacaagaagaaacccgggatgcccaatgtatctaacgacctctcacagaaactatatgccaccatggagaagcataaagaggtaagatgcagccacccagagttggggaaaaacggcaagatttctggccaggcatggtggctcacacctgtaatcccagcactttgggaggccaaggcgggtggatcacctgaggtcaggagttcaagaccagcctgaccaacacggtgaaaccttgctctactaaaaatacaaaattagctgggcatggtggcacatgcctgtaatcccagctactcaggaggctgaggcaggagaattgcttgaacctgagaagcggagattgcagtgagccgaggtcactccattgcactccagcctgggcaacaagagcgaaactccacctcagaaaaagaaataagaaatgaataaaaacactgactgttcgctgggcgtggtggctcatgcctgtaatcccagcactttggaggttgaggcaggcggatcacttgaggtcaggagttggagaccagcctggccaacatggcgaaccgaaaccccgtctctactaaaaatacaaaaattagcctggcgtggtggcacacacctgtaatccttgggatgctggggtgggaggatcacttgaacctgggaggcagaggttgcagtgcacttacagcctgggtgacagaacgagactctgtttcaaaaaataaaaagatttaacctttctgaaagtgaattagtaaatagaattggagaaaagttaaacttccacatatggacttacaacccccttctcaaaactttttgagttatttcatcatttacattgtttagttgttcttgcagtcatttgggaaaataactgggtaaggttttttttttctctctttaatatcatataattgataacgaaagccaggagaattgaagagtaattcctctcagggtttgtccaatggtagtaatctcgattgttcagtcagactcctcattttactatctcggttctcagacatataatcaagttcttataggaagtggtaattaagttgagagggaaatgaaggcttgatttcaggttgtaattccgtacctaaaaattggttaaacagtctctttgggagagaaatagttaacaaaatcttttttagagaggaatttgttataatgatgttatcatggtgaacacctatatacataggtgttcaaagtatcttttcccccactgctccccccatcaccaccccttttttgttagcctagaataatgggctacgatgtaataatggtaataaccattatctcagccatgctagtgaaatggaaggattcctgagttctaatacgttaggtaatgattattaacaattaatagttactagctatttcaagcagtaagtaatgccacagaatcctaggcagttgggaaaagcccttagaatatattgtaataggtttgacttaaattgtggacacattccatggctgtttaaatttaggttgtaaatccaagtattggcctggttgtagggtgacagaagcagcgaacattgctggccagagacactgtgagtgtggctgccagtgtgcacagatgttgaataatctgttatcagtacagcagtttctcacaagttcctaatttcttaaggggatgttttacattttattactttaataggtgtttatagttatatactaattaatgtcaaatacatatgtaataccagctttttataccttttacactaatggttatgagaattgatggttgttacaagttttttcaaacttcaatgaacaagaattttattgctttgtcaacaaagactaagattttttatccattccattcccttccaaacctgtaggaaaagttacacaggaaagttgcataggggaccttcatgagtccaggccagttgtttttcatactgtctccatatttggatttgtctggtttgttgtaattagattgaggttaaaccatggattgcatcttaaagtagactgccttgaggcaaaatgtccactgtgcatggtgctatacctcacccagaccattgttactctgaaggagttactgaatgaaggagaaaaaaatcacaggatgtgcatttcagttctatttatagtcagtctcaagagaccaaagaggtaaagcaggaaaaggaacaggaggcgtatggtggtgaaactaactcagcattcgccagtctcattggtgctcagcctgctgtacctgctcacacctgtaatcccagcactctgggaggctgaggcaggcagatcacttgagcttaggagtttgagaccagcctgggcaacatggcgaagcctcgtctctacaaaaaatgcagaaattagccaggtgtggtggtgtgggcctgtggtctcagctattcaggaggccatggtgggataattgcttgagcccaggaggcagaggttgtagtgagccaagatcacgccactgcattccagcctggatgacagagcgaggccctgtctcaaaaaaaagagactgtctgtttttcaggtcttctttgtgatccgcctcattgctggccctgctgccaactccctgcctcccattgttgatcctgatcctctcatcccctgcgatctgatggatggtcgggatgcgtttctcacgctggcaagggacaagcacctggagttctcttcactccgaagagcccagtggtccaccatgtgcatgctggtggagctgcacacgcagagccaggaccgctttgtctacacctgcaatgaatgcaagcaccatgtggagacacgctggcactgtactgtctgtgaggtaggcaccgggttgtgggaaggaggaggtgagctccgcagggttgttctgaggggccatgcagccacgtattttatagaggcctgtgggatgctaggggcttggcctcgtgtttgaggggcagagctgaagaggctagtttttgttctacgaaaggggcttttctagcccaaacaatatctaaaatacttttgaatgacttaaatcttggagagtttacgtgcacctcctgttttttccctaggattatgacttgtgtatcacctgctataacactaaaaaccatgaccacaaaatggagaaactaggccttggcttagatgatgagagcaacaaccagcaggctgcagccacccagagcccaggcgattctcgccgcctgagtatccagcgctgcatccagtctctggtccatgcttgccagtgtcggaatgccaattgctcactgccatcctgccagaagatgaagcgggttgtgcagcataccaagggttgcaaacggaaaaccaatggcgggtgccccatctgcaagcagctcattgccctctgctgctaccatgccaagcactgccaggagaacaaatgcccggtgccgttctgcctaaacatcaagcagaagctccggcagcaacagctgcagcaccgactacagcaggcccaaatgcttcgcaggaggatggccagcatgcagcggactggtgtggttgggcagcaacagggcctcccttcccccactcctgccactccaacgacaccaactggccaacagccaaccaccccgcagacgccccagcccacttctcagcctcagcctacccctcccaatagcatgccaccctacttgcccaggactcaagctgctggccctgtgtcccagggtaaggcagcaggccaggtgacccctccaacccctcctcagactgctcagccaccccttccagggcccccacctgcagcagtggaaatggcaatgcagattcagagagcagcggagacgcagcgccagatggcccacgtgcaaatttttcaaaggccaatccaacaccagatgcccccgatgactcccatggcccccatgggtatgaacccacctcccatgaccagaggtcccagtgggcatttggagccagggatgggaccgacagggatgcagcaacagccaccctggagccaaggaggattgcctcagccccagcaactacagtctgggatgccaaggccagccatgatgtcagtggcccagcatggtcaacctttgaacatggctccacaaccaggattgggccaggtaggtatcagcccactcaaaccaggcactgtgtctcaacaagccttacaaaaccttttgcggactctcaggtctcccagctctcccctgcagcagcaacaggtgcttagtatccttcacgccaacccccagctgttggctgcattcatcaagcagcgggctgccaagtatgccaactctaatccacaacccatccctgggcagcctggcatgccccaggggcagccagggctacagccacctaccatgccaggtcagcagggggtccactccaatccagccatgcagaacatgaatccaatgcaggcgggcgttcagagggctggcctgccccagcagcaaccacagcagcaactccagccacccatgggagggatgagcccccaggctcagcagatgaacatgaaccacaacaccatgccttcacaattccgagacatcttgagacgacagcaaatgatgcaacagcagcagcaacagggagcagggccaggaataggccctggaatggccaaccataaccagttccagcaaccccaaggagttggctacccaccacagcagcagcagcggatgcagcatcacatgcaacagatgcaacaaggaaatatgggacagataggccagcttccccaggccttgggagcagaggcaggtgccagtctacaggcctatcagcagcgactccttcagcaacagatggggtcccctgttcagcccaaccccatgagcccccagcagcatatgctcccaaatcaggcccagtccccacacctacaaggccagcagatccctaattctctctccaatcaagtgcgctctccccagcctgtcccttctccacggccacagtcccagcccccccactccagtccttccccaaggatgcagcctcagccttctccacaccacgtttccccacagacaagttccccacatcctggactggtagctgcccaggccaaccccatggaacaagggcattttgccagcccggaccagaattcaatgctttctcagcttgctagcaatccaggcatggcaaacctccatggtgcaagcgccacggacctgggactcagcaccgataactcagacttgaattcaaacctctcacagagtacactagacatacactagagacaccttgtattttgggagcaaaaaaattattttctcttaacaagactttttgtactgaaaacaatttttttgaatctttcgtagcctaaaagacaattttccttggaacacataagaactgtgcagtagccgtttgtggtttaaagcaaacatgcaagatgaacctgagggatgatagaatacaaagaatatatttttgttatggctggttaccaccagcctttcttcccctttgtgtgtgtggttcaagtgtgcactgggaggaggctgaggcctgtgaagccaaacaatatgctcctgccttgcacctccaataggttttattattttttttaaattaatgaacatatgtaatattaatagttattatttactggtgcagatggttgacatttttccctattttcctcactttatggaagagttaaaacatttctaaaccagaggacaaaaggggttaatgttactttaaaattacattctatatatatataaatatatataaatatatattaaaataccagttttttttctctgggtgcaaagatgttcattcttttaaaaaatgtttaaaaaaaaaaaaaaactgcctttcttcccctcaagtcaacttttgtgctccagaaaattttctattctgtaagtctgagcgtaaaacttcaagtattaaaataatttgtacatgtagagagaaaaatgactttttcaaaaatatacaggggcagctgccaaattgatgtattatatattgtggtttctgtttcttgaaagaatttttttcgttatttttacatctaacaaagtaaaaaaattaaaaagagggtaagaaacgattccggtgggatgattttaacatgcaaaatgtccctgggggtttcttctttgcttgctttcttcctccttaccctaccccccactcacacacacacacacacacacacacacacactttctataaaacttgaaaatagcaaaaaccctcaactgttgtaaatcatgcaattaaagttgattacttataaatatgaactttggatcactgtatagactg

SEQ ID NO: 164 - DNA, 9519 bp, Homo sapiens
tcttgtttgtgtgctaggctgggggggagagagggcgagagagagcgggcgagagtgggcaagcaggacgccgggctgagtgctaactgcgggagccagagagtgcggaggggagtcgggtcggagagaggcggcaggggccgagacagtggcagggggcccggggcgcacgggctgaggcgacccccagccccctcccgtccgcacacacccccaccgcggtccagcagccgggccggcgtcgacgcctaggggggaccattacataaccccgcgccccgcggcgtcttctcccgccgccgcgggcggccccgaacggagccccggggggcgggcgctcccagcacctggccgccggcggtgggggccgtagcagcggccgtatttatttattttccgcgggaaaggaaggcgaaggaggggagcgcggcgcgaggaggggccgcctgcgccgccgccggagcggggcctcctcggtgggctccgcgtcggcgcgggcgtgcgggcggcgctgctcggcccggccccctcggccctctggtccggccagctccgctcccggcgtccttgccgcgcctccgccggccgccgcgcgatgtgaggcggcggcgccagcctggctctcggctcgggcgagttctctgcggccattaggggccggtgcggcggcggcggcgcggagcgcggcggcaggaggagggttcggagggtgggggcgcaggcccgggagggggcaccgggaggaggtgagtgtctcttgtcgcctcctcctctccccccttttcgcccccgcctccttgtggcgatgagaaggaggaggacagcgccgaggaggaagaggttgatggcggcggcggagctccgagagacctcggctgggcaggggccggccgtggcgggccggggactgcgcctctagagccgcgagttctcgggaattcgccgcagcggacgcgctcggcgaatttgtgctcttgtgccctcctccgggcttgggcccaggcccggcccctcgcacttgcccttaccttttctatcgagtccgcatccctctccagccactgcgacccggcgaagagaaaaaggaacttcccccaccccctcgggtgccgtcggagccccccagcccacccctgggtgcggcgcggggaccccgggccgaagaagagatttcctgaggattctggttttcctcgcttgtatctccgaaagaattaaaaatggccgagaatgtggtggaaccggggccgccttcagccaagcggcctaaactctcatctccggccctctcggcgtccgccagcgatggcacagattttggctctctatttgacttggagcacgacttaccagatgaattaatcaactctacagaattgggactaaccaatggtggtgatattaatcagcttcagacaagtcttggcatggtacaagatgcagcttctaaacataaacagctgtcagaattgctgcgatctggtagttcccctaacctcaatatgggagttggtggcccaggtcaagtcatggccagccaggcccaacagagcagtcctggattaggtttgataaatagcatggtcaaaagcccaatgacacaggcaggcttgacttctcccaacatggggatgggcactagtggaccaaatcagggtcctacgcagtcaacaggtatgatgaacagtccagtaaatcagcctgccatgggaatgaacacagggatgaatgcgggcatgaatcctggaatgttggctgcaggcaatggacaagggataatgcctaatcaagtcatgaacggttcaattggagcaggccgagggcgacagaatatgcagtacccaaacccaggcatgggaagtgctggcaacttactgactgagcctcttcagcagggctctccccagatgggaggacaaacaggattgagaggcccccagcctcttaagatgggaatgatgaacaaccccaatccttatggttcaccatatactcagaatcctggacagcagattggagccagtggccttggtctccagattcagacaaaaactgtactatcaaataacttatctccatttgctatggacaaaaaggcagttcctggtggaggaatgcccaacatgggtcaacagccagccccgcaggtccagcagccaggcctggtgactccagttgcccaagggatgggttctggagcacatacagctgatccagagaagcgcaagctcatccagcagcagcttgttctccttttgcatgctcacaagtgccagcgccgggaacaggccaatggggaagtgaggcagtgcaaccttccccactgtcgcacaatgaagaatgtcctaaaccacatgacacactgccagtcaggcaagtcttgccaagtggcacactgtgcatcttctcgacaaatcatttcacactggaagaattgtacaagacatgattgtcctgtgtgtctccccctcaaaaatgctggtgataagagaaatcaacagccaattttgactggagcacccgttggacttggaaatcctagctctctaggggtgggtcaacagtctgcccccaacctaagcactgttagtcagattgatcccagctccatagaaagagcctatgcagctcttggactaccctatcaagtaaatcagatgccgacacaaccccaggtgcaagcaaagaaccagcagaatcagcagcctgggcagtctccccaaggcatgcggcccatgagcaacatgagtgctagtcctatgggagtaaatggaggtgtaggagttcaaacgccgagtcttctttctgactcaatgttgcattcagccataaattctcaaaacccaatgatgagtgaaaatgccagtgtgccctccctgggtcctatgccaacagcagctcaaccatccactactggaattcggaaacagtggcacgaagatattactcaggatcttcgaaatcatcttgttcacaaactcgtccaagccatatttcctacgccggatcctgctgctttaaaagacagacggatggaaaacctagttgcatatgctcggaaagttgaaggggacatgtatgaatctgcaaacaatcgagcggaatactaccaccttctagctgagaaaatctataagatccagaaagaactagaagaaaaacgaaggaccagactacagaagcagaacatgctaccaaatgctgcaggcatggttccagtttccatgaatccagggcctaacatgggacagccgcaaccaggaatgacttctaatggccctctacctgacccaagtatgatccgtggcagtgtgccaaaccagatgatgcctcgaataactccacaatctggtttgaatcaatttggccagatgagcatggcccagccccctattgtaccccggcaaacccctcctcttcagcaccatggacagttggctcaacctggagctctcaacccgcctatgggctatgggcctcgtatgcaacagccttccaaccagggccagttccttcctcagactcagttcccatcacagggaatgaatgtaacaaatatccctttggctccgtccagcggtcaagctccagtgtctcaagcacaaatgtctagttcttcctgcccggtgaactctcctataatgcctccagggtctcaggggagccacattcactgtccccagcttcctcaaccagctcttcatcagaattcaccctcgcctgtacctagtcgtacccccacccctcaccatactcccccaagcataggggctcagcagccaccagcaacaacaattccagcccctgttcctacacctcctgccatgccacctgggccacagtcccaggctctacatccccctccaaggcagacacctacaccaccaacaacacaacttccccaacaagtgcagccttcacttcctgctgcaccttctgctgaccagccccagcagcagcctcgctcacagcagagcacagcagcgtctgttcctaccccaacagcaccgctgcttcctccgcagcctgcaactccactttcccagccagctgtaagcattgaaggacaggtatcaaatcctccatctactagtagcacagaagtgaattctcaggccattgctgagaagcagccttcccaggaagtgaagatggaggccaaaatggaagtggatcaaccagaaccagcagatactcagccggaggatatttcagagtctaaagtggaagactgtaaaatggaatctaccgaaacagaagagagaagcactgagttaaaaactgaaataaaagaggaggaagaccagccaagtacttcagctacccagtcatctccggctccaggacagtcaaagaaaaagattttcaaaccagaagaactacgacaggcactgatgccaactttggaggcactttaccgtcaggatccagaatcccttccctttcgtcaacctgtggaccctcagcttttaggaatccctgattactttgatattgtgaagagccccatggatctttctaccattaagaggaagttagacactggacagtatcaggagccctggcagtatgtcgatgatatttggcttatgttcaataatgcctggttatataaccggaaaacatcacgggtatacaaatactgctccaagctctctgaggtctttgaacaagaaattgacccagtgatgcaaagccttggatactgttgtggcagaaagttggagttctctccacagacactgtgttgctacggcaaacagttgtgcacaatacctcgtgatgccacttattacagttaccagaacaggtatcatttctgtgagaagtgtttcaatgagatccaaggggagagcgtttctttgggggatgacccttcccagcctcaaactacaataaataaagaacaattttccaagagaaaaaatgacacactggatcctgaactgtttgttgaatgtacagagtgcggaagaaagatgcatcagatctgtgtccttcaccatgagatcatctggcctgctggattcgtctgtgatggctgtttaaagaaaagtgcacgaactaggaaagaaaataagttttctgctaaaaggttgccatctaccagacttggcacctttctagagaatcgtgtgaatgactttctgaggcgacagaatcaccctgagtcaggagaggtcactgttagagtagttcatgcttctgacaaaaccgtggaagtaaaaccaggcatgaaagcaaggtttgtggacagtggagagatggcagaatcctttccataccgaaccaaagccctctttgcctttgaagaaattgatggtgttgacctgtgcttctttggcatgcatgttcaagagtatggctctgactgccctccacccaaccagaggagagtatacatatcttacctcgatagtgttcatttcttccgtcctaaatgcttgaggactgcagtctatcatgaaatcctaattggatatttagaatatgtcaagaaattaggttacacaacagggcatatttgggcatgtccaccaagtgagggagatgattatatcttccattgccatcctcctgaccagaagatacccaagcccaagcgactgcaggaatggtacaaaaaaatgcttgacaaggctgtatcagagcgtattgtccatgactacaaggatatttttaaacaagctactgaagatagattaacaagtgcaaaggaattgccttatttcgagggtgatttctggcccaatgttctggaagaaagcattaaggaactggaacaggaggaagaagagagaaaacgagaggaaaacaccagcaatgaaagcacagatgtgaccaagggagacagcaaaaatgctaaaaagaagaataataagaaaaccagcaaaaataagagcagcctgagtaggggcaacaagaagaaacccgggatgcccaatgtatctaacgacctctcacagaaactatatgccaccatggagaagcataaagaggtcttctttgtgatccgcctcattgctggccctgctgccaactccctgcctcccattgttgatcctgatcctctcatcccctgcgatctgatggatggtcgggatgcgtttctcacgctggcaagggacaagcacctggagttctcttcactccgaagagcccagtggtccaccatgtgcatgctggtggagctgcacacgcagagccaggaccgctttgtctacacctgcaatgaatgcaagcaccatgtggagacacgctggcactgtactgtctgtgaggattatgacttgtgtatcacctgctataacactaaaaaccatgaccacaaaatggagaaactaggccttggcttagatgatgagagcaacaaccagcaggctgcagccacccagagcccaggcgattctcgccgcctgagtatccagcgctgcatccagtctctggtccatgcttgccagtgtcggaatgccaattgctcactgccatcctgccagaagatgaagcgggttgtgcagcataccaagggttgcaaacggaaaaccaatggcgggtgccccatctgcaagcagctcattgccctctgctgctaccatgccaagcactgccaggagaacaaatgcccggtgccgttctgcctaaacatcaagcagaagctccggcagcaacagctgcagcaccgactacagcaggcccaaatgcttcgcaggaggatggccagcatgcagcggactggtgtggttgggcagcaacagggcctcccttcccccactcctgccactccaacgacaccaactggccaacagccaaccaccccgcagacgccccagcccacttctcagcctcagcctacccctcccaatagcatgccaccctacttgcccaggactcaagctgctggccctgtgtcccagggtaaggcagcaggccaggtgacccctccaacccctcctcagactgctcagccaccccttccagggcccccacctgcagcagtggaaatggcaatgcagattcagagagcagcggagacgcagcgccagatggcccacgtgcaaatttttcaaaggccaatccaacaccagatgcccccgatgactcccatggcccccatgggtatgaacccacctcccatgaccagaggtcccagtgggcatttggagccagggatgggaccgacagggatgcagcaacagccaccctggagccaaggaggattgcctcagccccagcaactacagtctgggatgccaaggccagccatgatgtcagtggcccagcatggtcaacctttgaacatggctccacaaccaggattgggccaggtaggtatcagcccactcaaaccaggcactgtgtctcaacaagccttacaaaaccttttgcggactctcaggtctcccagctctcccctgcagcagcaacaggtgcttagtatccttcacgccaacccccagctgttggctgcattcatcaagcagcgggctgccaagtatgccaactctaatccacaacccatccctgggcagcctggcatgccccaggggcagccagggctacagccacctaccatgccaggtcagcagggggtccactccaatccagccatgcagaacatgaatccaatgcaggcgggcgttcagagggctggcctgccccagcagcaaccacagcagcaactccagccacccatgggagggatgagcccccaggctcagcagatgaacatgaaccacaacaccatgccttcacaattccgagacatcttgagacgacagcaaatgatgcaacagcagcagcaacagggagcagggccaggaataggccctggaatggccaaccataaccagttccagcaaccccaaggagttggctacccaccacagcagcagcagcggatgcagcatcacatgcaacagatgcaacaaggaaatatgggacagataggccagcttccccaggccttgggagcagaggcaggtgccagtctacaggcctatcagcagcgactccttcagcaacagatggggtcccctgttcagcccaaccccatgagcccccagcagcatatgctcccaaatcaggcccagtccccacacctacaaggccagcagatccctaattctctctccaatcaagtgcgctctccccagcctgtcccttctccacggccacagtcccagcccccccactccagtccttccccaaggatgcagcctcagccttctccacaccacgtttccccacagacaagttccccacatcctggactggtagctgcccaggccaaccccatggaacaagggcattttgccagcccggaccagaattcaatgctttctcagcttgctagcaatccaggcatggcaaacctccatggtgcaagcgccacggacctgggactcagcaccgataactcagacttgaattcaaacctctcacagagtacactagacatacactagagacaccttgtattttgggagcaaaaaaattattttctcttaacaagactttttgtactgaaaacaatttttttgaatctttcgtagcctaaaagacaattttccttggaacacataagaactgtgcagtagccgtttgtggtttaaagcaaacatgcaagatgaacctgagggatgatagaatacaaagaatatatttttgttatggctggttaccaccagcctttcttcccctttgtgtgtgtggttcaagtgtgcactgggaggaggctgaggcctgtgaagccaaacaatatgctcctgccttgcacctccaataggttttattattttttttaaattaatgaacatatgtaatattaatagttattatttactggtgcagatggttgacatttttccctattttcctcactttatggaagagttaaaacatttctaaaccagaggacaaaaggggttaatgttactttaaaattacattctatatatatataaatatatataaatatatattaaaataccagttttttttctctgggtgcaaagatgttcattcttttaaaaaatgtttaaaaaaaaaaaaaaactgcctttcttcccctcaagtcaacttttgtgctccagaaaattttctattctgtaagtctgagcgtaaaacttcaagtattaaaataatttgtacatgtagagagaaaaatgactttttcaaaaatatacaggggcagctgccaaattgatgtattatatattgtggtttctgtttcttgaaagaatttttttcgttatttttacatctaacaaagtaaaaaaattaaaaagagggtaagaaacgattccggtgggatgattttaacatgcaaaatgtccctgggggtttcttctttgcttgctttcttcctccttaccctaccccccactcacacacacacacacacacacacacacacactttctataaaacttgaaaatagcaaaaaccctcaactgttgtaaatcatgcaattaaagttgattacttataaatatgaactttggatcactgtatagactg

SEQ ID NO: 165 - protein, 2404 aa, Homo sapiens
MAENVVEPGPPSAKRPKLSSPALSASASDGTDFGSLFDLEHDLPDELINSTELGLTNGGDINQLQTSLGMVQDAASKHKQLSELLRSGSSPNLNMGVGGPGQVMASQAQQSSPGLGLINSMVKSPMTQAGLTSPNMGMGTSGPNQGPTQSTGMMNSPVNQPAMGMNTGMNAGMNPGMLAAGNGQGIMPNQVMNGSIGAGRGRQNMQYPNPGMGSAGNLLTEPLQQGSPQMGGQTGLRGPQPLKMGMMNNPNPYGSPYTQNPGQQIGASGLGLQIQTKTVLSNNLSPFAMDKKAVPGGGMPNMGQQPAPQVQQPGLVTPVAQGMGSGAHTADPEKRKLIQQQLVLLLHAHKCQRREQANGEVRQCNLPHCRTMKNVLNHMTHCQSGKSCQVAHCASSRQIISHWKNCTRHDCPVCLPLKNAGDKRNQQPILTGAPVGLGNPSSLGVGQQSAPNLSTVSQIDPSSIERAYAALGLPYQVNQMPTQPQVQAKNQQNQQPGQSPQGMRPMSNMSDMGVNGGVGVQTPSLLSDSMLHSAINSQNPMMSENASVPSLGPMPTAAQPSTTGIRKQWHEDITQDLRNHLVHKLVQAIFPTPDPAALKDRRMENLVAYARKVEGDMYESANNRAEYYHLLAEKIYKIQKELEEKRRTRLQKQNMLPNAAGMVPVSMNPGPNMGQPQPGMTSNGPLPDPSMIRGSVPNQMMPRITPQSQQFGQMSMAQPPIVPRQTPPLQHHGQLAQPGALNPPMGYGPRMQQPSNQGQFLPQTQFPSQGMNVTNIPLAPSSGQAPVSQAQMSSSSCPVNSPIMPPGSQGSHIHCPQLPQPALHQNSPSPVPSRTPTPHHTPPSIGAQQPPATTIPAPVPTPPAMPPGPQSQALHPPPRQTPTPPTTQLPQQVQPSLPAAPSADQPQQQPRSQQSTAASVPTPTAPLLPPQPATPLSQPAVSIEGQVSNPPSTSSTEVNSQAIAEKQPSQEVKMEAKMEVDQPEPADTQPEDISESKVEDCKMESTETEERSTELKTEIKEEEDQPSTSATQSSPAPGQSKKKIFKPEELRQALMPTLEALYRQDPESLPFRQPVDPQLLGIPDYFDIVKSPMDLSTIKRKLDTGQYQEPWQYVDDIWLMFNNAWLYNRKTSRVYKYCSKLSEVFEQEIDPVMQSLGYCCGRKLEFSPQTLCCYGKQLCTIPRDATYYSYQNRYHFCEKCFNEIQGESVSLGDDPSQPQTTINKEQFSKRKNDTLDPELFVECTECGRKMHQICVLHHEIIWPAGFVCDGCLKKSARTRKENKFSAKRLPSTRLGTFLENRVNDFLRRQNHPESGEVTVRVVHASDKTVEVKPGMKARFVDSGEMAESFPYRTKALFAFEEIDGVDLCFFGMHVQEYGSDCPPPNQRRVYISYLDSVHFFRPKCLRTAVYHEILIGYLEYVKKLGYTTGHIWACPPSEGDDYIFHCHPPDQKIPKPKRLQEWYKKMLDKAVSIVHDYKDIFKQATEDRLTSAKELPYFEGDFWPNVLEESIKELEQEEEERKREENTSNESTDVTKGDSKNAKKKNNKKTSKNKSSLSRGNKKKPGMPNVSNDLSQKLYATMEKHKEVFFVIRLIAGPAANSLPPIVDPDPLIPCDLMDGRDAFLTLARDKHLEFSSLRRAQWSTMCMLVELHTQSQDRFVYTCNECKHHVETRWHCTVCEDYDLCITCYNTKNHDHKMEKLGLGLDDESNNQQAAATQSPGDSRRLSIQRCIQSLVHACQCRNANCSLPSCQKMKRVVQHTKGCKRKTNGGCPICKQLIALCCYHAKHCQENKCPVPFCLNIKQKLRQQQLQHRLQQAQMLRRRMASMQRTGVVGQQQGLPSPTPATPTTPTGQQPTTPQTPQPTSQPQPTPPNSMPPYLPRTQAAGPVSQGKAAGQVTPPTPPQTAQPPLPGPPPAAVEMAMQIQRAAETQRQMAHVQIFQRPIQHQMPPMTPMAPMGMNPPPMTRGPSGHLEPGMGPTGMQQQPPWSQGGLPQPQQLQSGMPRPAMMSVAQHGQPLNMAPQPGLGQVGISPLKPGTVSQQALQNLLRTLRSPSSPLQQQQVLSILHANPQLLAAFIKQRAAKYANSNPQPIPGQPGMPQGQPGLQPPTMPGQQGVHSNPAMQNMNPMQAGVQRAGLPQQQPQQQLQPPMGGMSPQAQQMNMNHNTMPSQFRDILRRQQMMQQQQQQGAGPGIGPGMANHNQFQQPQGVGYPPQQQQRMQHHMQQMQQGNMGQIGQLPQALGAEAGASLQAYQQRLLQQQMGSPVQPNPMSPQQHMLPNQAQSPHLQGQQIPNSLSNQVRSPQPVPSPRPQSQPPHSSPSPRMQPQPSPHHVSPQTSSPHPGLVAAQANPMEQGHFDDQNSMLSQLNPGMANLHGASATDLGLSTDNSDLNSNLSQSTLDIH

SEQ ID NO: 166 - DNA, 23426 bp, Mus musculus
agtttagggaacagggggtggaagcgggaaatgcgagtgggcgtgcccgcttgaagggtcgaagggcgtgttgtgcgtgatgacgcaacgtcgctgattgggcgagagacaaggagcccgcgtggacgtggtgcccaccttctgctgtcccagtggcttgcccgcctgcggttaaggtaggttcgccgcaccacatgtgttggatgaggcctgccttggtggcttgcttgcacgcttagtgtcgcgcgacccctggcctcaccacggagcagcgctgtcgacctgcaggacctgggtcatgctcctttctccccagaaggcggaacaggactggtggttgagccaatctctagctgaaggttgggggagaaatgaagacgaatgtttcagccagagcaccaagtaccgtcccagtccagttggagctcgagataggaccttcagtgctgagccgctatgttatacctcgccctcacccctagccattttggtcctgcagcatccttaagggatagccaaggggaggttgttgcagcaatgaccccatgcacatttctcttgcctctccaatgatatggagagctttggaggaagcaggagccatcattcacattctttattagtgacccgagcatttagaacagatctaaagagaacccagaagtctgtctgtctgtctctcttttttttttctggtgtgtgtggcataggtccgggtacactgtaggaaagcgcattaccacagagctacctgccttggttttttttttttttttttttttcatttaaattcataacttctctcacctagtgagcaaaccaacatgtcagagtgggagtcctactacaaaactgagggcgaggaagaggaagaggaggaggagagccccgacacaggtggtaagtggcctgtgtggaagattttcgctgtgtacttttttttttgctgggagcactttatgttgtctgatatccctcccttttctcctcagataatctaaaatattttttctccctttgagttttacagttattatttagatcctatttcactctatgaacattcctaaccctattttcctttttttttttttactaaccacgatagagaatttattaatcttcaataaatgactctgtccatggtaatatttgtcactttattttttacatatttttgattgtttaaaaaaatctacttatttttattttatgtatgtgtgtacacctctgtacatgtctggtgcaaaagggagccagaagagggagtcggatctcctgctactaaagttataggtggttgtgagcctccatgtgcattctgtgaagtgaagctggatcgtgtgtgagagagcgtcaagtattcttaaccattgctttaaccactgagcagcctccccagctcctgtttgtttctgaggcaaggtcttatgtagaccaggctgacttcaaactcactctgtaactgatgtagactttgagcttctttttttttttttttttttttgactttgagcttctaatgactcctgggaatcgagttaacataaaagtgggtgcattggtggctatacatcctggtctctaacttgcctcctgcctcttgcctggaatcagcccagctccaggcttgcactaggaaacctccctcatggtgtaagagactcccaggggctggagagatggctcagtggttgagagcactggctgttcttctagaggacctgggttctaattctagcatccccatggtggttcacaaccatctatagctctatttccaggggacctaatgcacttttctgatctctgagagtaacaagcacacacatggttttacattcatatatatgcaagcaaaactttcacacacaaaataaaatgaatacattaataattttttttccagacagggtttctctttgtagccctagctgtcctagaactcactctgtagactagcctggcctcgaagtaaagagatttgccagccaatgcctcctgagtgctaggattaaagatactcactaccacacccagctgaaatttttttttcgagacagggtttctctgtgtagccctggctgtcctggaactaactctgtagaccaggctagcctcgaactcagaaatccgcctgcttccgcctcccgagtgctgggattaaaggcgtgcgccaccaccgcccagcaaaaatttttaaaggaaataaaaataagtcaaaactaacgatttgagagatatacataggactcagggtcctgacaggagtggaggctttaagtgggttcatcttataatttgtcaagttctacttgtaactctatgggcttgtctctgttttgtgtgattggtaaacataataaatacaatgcaaaaggcaaacattgttttccatttatttttccataggagaatataaatattcaggaagagatagcttgatttttctggttgatgcctccagggctatgttcgaatctcagggtgaagatgaactcacaccttttgatatgagcatccaggtaagacattattcaaccccaaacattgaatgggtgtggtggctcatgtctcttatctcagcactcaggaggcagaggcagagagatctcttgagtagaggcctacctggtctacatggtgagttccaggacagacaagggctacatagggagaccctgtctcaagacacaaagctaaaaaataggaagaagactgtggagcagaacgtgtgtgggtaatgaggtcaggacggcagggatagcctgtgtctcctgactgactggcttaagcctgcagtgcaacactggttccaaggctgtcagactgtttcttatccacaggcctcatgtggcctccagaatttccctttggtgtcaatcagacttaatttgtagctgtcccctcccacttctaaagatgctctgggaatgatgtcatatgcctgtaatctgcaccttggaggctaaagtagaaagagtgtaacgccatagtgagagtctgccaagaaggaaattagtgccactttaaattgttttctttgttttttgagataaggttttgtaccttgccttttgctattttgtgggttcttgtttctttttcccttccccaccctttttcttctgccctgtcaacctctaacactagataggagggaagaaagaatggagaggaaaggaaagagatccctgaatagagtcaggggttggaaagagggtgacattatttttagactactctgtgctgattggggcaagtttgaccttcgtcatcaggatacccaatttcttcctgttgtttctttgtgcaaaccatttcttctttaacaaaccatgaccagcagcaaccaacaacccaccctgtctcttggagccctagcatttatatactctcccaaaagccttcagaatgccaagcatcacacaattgcaggaactatctgcagctgaaaaaagtcacagcaccgcttgagcacgagacaaatcacagtcacctgcggaggacagtcccgagcagctccacatcccacacctggcatctaagtgaaaacacatttttacagtatttctgtgtttttttcaaagaaactgaaactccaaaattgtcactacagggtttctctgtgtggccctggctgttctgcagctcactgtagagagtgagttcctacagatttgcctgcctctgcctcctgacggctgagactaaaggtgtgtactactatcacctggctattttaaattttaatcagtgtgtgtgtgtgtgtgtgtgtgtgtgtgtgtgtgtgtgtgtagggtcagaggggtattagatcattgggagctggagttacagatagttgtgagctgcctggtgtgacttgctgggaattgaacctgggtcttctgcaagcacagtacgtgctcagatggttactgagccatctccccagccctctcattacttttttttttttttttaatagatgtatttgttttatgtatgtgagtacactgtagccatcttcagacacaccagaagagggcatcagatcccattacagatggttgtgagccaccatgtggttgctgggaattgaactcaggacaacctctagaagagcagtcagccatcttaactacttaactactgagccatctctctaaccgccatcattacttttttttttttaatcactgtttttttgtttgtttgtttgtttgttttgttttgagacagggtttctctgtatagctctggctgtcctggaactcactttgtagaccacgctggccttgaactcagaaaactgcctatctctgcctcccaagtgctgggattgaaggcgtgcgtcatcactgcccggctaatcattattttttaagttgagtgtctcatatagcctaggctggcttcagaatttactttgtacccaaggatgaccataaatttctcatcttcttgtctcccatctcccatgtactgatattataaattatactggtataataccatgtgctagtattataaatgggtactatcacacccagaaaatgccacttttatttaatttaaaatatatttaactgaaattttacatattttttaagttattttgtgtatatgggtgttctttctgtaggtatgtctgtgtaccacttttatagttgataccagtggatgtcaaaaaagggcatcagatgtctagacctggagttatatacaattgtaaggctccatgtgggtgctgggaattgaacctgagtcctctggaagagaaaagttagtgctcttaactgatgagccatctttccagctcctttaaataccacttttaaaaatgtggactccttagaaaatttctgttaatgatgcttaaatcccccactacacacacacacaagtacacaagtctttttgcaagtgaatcctgagaattgaatattactattaataaacaattgcaacacagctttaaaatgggcagaagagaactaaggatttagaggagttggtagagcgcttgcctcacgtgtggagaccctgggctggcgatacacagtagtatttacagcacttgagaggtgggaatggaagggtcagaggttcaaggtcatgcttggctacatatttaagtttgaggccagcctgggcttcatgagaccctgtctcaaaatagggacagggggacaaaggatttgagtagccatttcttgaaagataacaaacagaagccactgttatgaatgctcaaagaggcagtggtggcgcacacctttaatctcagagctggggaggcagaggcaggcaaatctgtgtgacttcaaagccagcttggtctacagagaggttccaggacagcagagctatgtagagagaccctgtctcaaaaaacaaagtaaaatcttaaaaatgaaacaaaaccaagccaacatgaaggcatgcagctggtatggcaagtgacttagcagttcctcactgctaagttaatagagtgagacttgtcatgtggcccaggcagtcgactcttaatgtgtatgacatgtagaatgaaaaacagatacccaggcctgaggatcagctcagttggtagaggacgtgcctaccatgcgtaaagtcatgagttcattccccagcattatacaaacccagcatgatggtaacaggcttatagcctcctgcctcctccttcccagtgctgggactacggtcatgtgctgccatgccagacttaacgcagcatccagactgaacagggctctgtgccacaccagatacttatagagacttagtgttaagctaacactcagggagttttatttttttttacagtgtatccagagtgtgtacaccagtaagatcataagcagcgatcgggatctcctggcagtggtgttctatggaaccgagaaagataaaaattcagtgaatttcaaaaatatttatgtcttacaagatttggacaacccaggtcagtaatagtcaaagaacacggcttccttaatgtgagaatatcactaaggtgaacaaaagagggccctggaggaggaagcagctttgaccttggctagggccttggtttcctgcacagaaggtccctccactctagttaggcagggctgagtgagcagggcccctggcctgttagcctgtggtgaagttggctgactcttgtttgccctgcctctcaccaggcgctaagcgagtgctagagctcgaccagtttaagggacaacaggggaagaagcacttccgagacacggttggccatgggtctgactactctttgagtgaagtgctctgggtctgtgccaacctcttcagcgacgtccagctcaagatgagtcacaagaggatcatgctgttcaccaatgaagacgacccccatggccgtgacagtgctaaagccagccgggccaggaccaaagccagcgacctccgggacactggtgggcacttcccttgttcttctatcattgctttaaaaatagtgtgtatgtgtgtgtgtgcttgtatgtagttatgtccccgtgtgcatccaggagcctgtggagtcagaagaggcatcccgtgcccaagtgctggaattacagatggttgtgtgtggccatgtggttgctggaaactgaacccaggtcctctggaagagcagtcagtgctcttaattgctgagccatctctccagccttattttcttagttgcttttttccctttaactttatttactttatgcatttgggggttttaaatgcacgtctgtgcatttatccagctccaaatgaacgtatgttttaatttttaaaaaattacttaatagccaggcaatgatgtcgcacacctttaatcctagcacttggaaggcagaggcaggtggatttttgagttcgaggccagcctggtctacagagtgagttccaggacagccagggctacgcagagaaatctgtcttgaagacacaaacaaacaaaaattagttaattaaaaatgttatatatatatggatgttttatccgcgtagatgtgtgtgcaccacttttgtgcaaggtgcctgtacaggcctgaagaggtcgttaagtcatcatcatatctcctggaactggcattcgacaacggtgaactgccacgtgggtgctgagaatcaaatccagggtctctggaagagcagccagtgctcttaactattgagcccacccgtgcttctttttttttctgttttgttttgcttttttttccatttttgttttcaagatagggtttctctctgtagtctttgctgtcctggagtttgacctgtaggctcactggccacaaattcacagagatccatttcctcagcctctgagtgctgggattgaaggtctgtgccatcactgtccagcccttcttattctttttagttgctcctaacttactttctttatagctcaagcattgcttttgccaccaagagacaaaggaaagatgaagcagagccaagggggagacactagtgtggcctgtcgccttccatctggctacagtctccaccacagcttacttgttctgacctcagtgatgcaatggatggtggctgtttgaaagttgttggaagtacttgtaacagctgaatggcataggcacttctgtaggtcctggaaacgttaatagtctatctagattctgtgggagctttgtttgtttttgaggtggctttgttatataagccgtgctggtctggaagtgctctgtagccaggcaggcctcaagcaggccatcttccctttttaacctccctggtgatggggttaatgctgcgcactgtcatgcctagtctagagaaggaggcatctgaagccgattcctccccctcttctggcctctgtgggcactgcattcatgaagtacagacatacatgcaaacaaaacactggtataacaggtaaatacagctttaaaacagagaataaaggatgtttgcccgcacctggtgatgcctacctcaaatcccagcactttggagactgaggcaagaagaatatgggtccagcctgggctaccagcaaatgcgatccatttctatttaactgaaagcaaatgctagagttgggcagtgttttgtttcatagctttagatatatgggagactgaggcaggaggattgcttagtctacgaccttcagtctaggtcacatagcaagacactgagcactgcttgtcggtttggtagattcagattctcttgtcacccaagctgctctggaggttgctgtgcaacttgggtaaccttgctttcctggtcctaaccctgacctgcctcctgggtgctgggattatgggcatgttgcaccacctcacgggactgctttgctccatctttgagaccaaaataaataaacaaacaacaaataaataggccacaatgtaactcatgatggcccaaaactcaaatgtggcccaacatagcctcaaactcacagcagtcctactgcctcagcctctctggtatagatatgatctctcaaatcttttctttatggaaataaagtcacacctggtatctctggctggccccaaacttgccgtgtagacctatggacttgttacattcctccttcctttgcttcccaagaattagtaataccaatataatatacaatataatatacatccccacatctggcctggcaccatctctgtttaaacaaaaacttaaggccccgccccccataaaaataaacaaacttagcctggtatggtagcatactcctttgatcagaggcagatatatttctgaattccaggccaccctggcctacaaagtgagttctgtctcaaaagaaaaaacagtaattcccatttgctgtccttcgctatccctggttttaatctttcttcacaccagggatcttccttgacttgatgcatctgaagaagccaggaggctttgatgtatccgtgttctacagggacatcatcaccaccgctgaggacgaggaccttggggttcacttcgaggagtcaagcaagctggaagacctgctaaggaaggttcgagccaaggagaccaaaaagcgagttctgtccaggtgggcacccagcctgggctagcctgctcatacctcccttaacaaatcgcaggcaaggcatagatttgacttccccacactgttctcccactggcctcctcgggatagcatgaactgtcagttcttccccagcagggtatgtctccacagtcacgcagcagccttctgtgtccttgagcgctaagtactctgagcatcccttgatacctcctcccctctctgtccatggcagatggtagtgacctctgcaccattaggttatttatcgtaaggagtgagtcagagacatctaacatacaagtacgcttaacagatgctatgtattgataagttatatatatgtatgggtgcctatgtatgaaacaggggaacaggcattggcttccttagaactggaattatagatggttgtgaggcacctgatgtggatgctgggaattgaactcaggacctctggaagagcagtaagtgctcttaaccactgcaccatctctccagctgccaggtgttagttatcgtcattaaaattatattatcattcagctaataagctggctctctaggtaaaggtgcatgctgccaagcctgacggcctgagttctcctcctgggacccctgtagtggagggaaagggccaacttctcaagctgccctctgccctcccacacccgcgctgtggatgtgcaccctccccccagataaataagtgcttttgtttttccagacagggtttctctgtgtagctccgggtgtcctggaacttgctctgtagaacaggctggccctgaaatcagacctgcctctgcctccacccaagtgctgggattaaaggcgtagactaccatgcctagctttaattgatttttttaatagcatgaggtgaataataataataataataatagatttttttttaagatttgtttattatatgtaagtacactgtagctgtcttcaaacgcaccagaagagggcatcagatttcattacaaatggttgtgagccaccatgtggttgctgggatttgaacccaggatcttcggaagaacagtcagtgctcttaacccccgagccatcttgccagccctgttagattttatttatttatttatttatttatttattaaagacagggtcttgctgtgtattctaagctgggttttcagatgtctactatcatgcttgaccacgttttaccttttctccacctctccacttgtttgttcttattactgtttgggacagagtcttgtgtgtagacctgcgtacctggtacttggtcatatttgttccccgtgctggccttgaattcagggcgtcttactgtcttagtccctcacctgctgggattggccatgtgcccccatgcccagtgctgaactctgtttgcagcccattcactatttgtgttttgactaaggttattggacagagtaacgcagactggaacttggatgctgtgaaaaccttttacataggaaagtacagtctgctcgctcatacttgctttgtttctctttccctttcctcccccaggttaaagtttaagctcggtgaagacgtagtactcatggtgggcatttataacttggtccagaaagctaacaagccttttccagtgagactctatcgggaaacaaatgaaccagtgaaaaccaagacaaggacttttaatgtaaacaccggcagtctactcctgcctagtgacaccaagcggtctctggtaggtggctaacctttcctaccgaatcttgtttaagaactgacagagaggtggggctgtagaggtggctcagcagttaagagaacatatcctgtccatgcatcgtacccaggttctggtcccagcatccacatggtggctcacagccaaccatactttggtttcaggagactagaccccttctgacctctgcatgcatgaggcatgcacgaggcgtgcacatgctgcacatacatacatgcagataaataaatctttaaacaacaggagctggacatgatagcacatgactttaatctcagaactcaggagacaaaagcaggcagatctctggggacagtctgggttacaagagttcgttccaggacagacaggactgtgtagagaccatgtctgggcgaaagaaaaccagacagacacactgagcaagctagccagtgaagtaagtcactgtaaactgcgtctttctggataaacggtcaggacaggaagcagctggccttgcagctatggcatatgtcaaggaacaggccaggtgttggtggcttgcttagcacacactactgtaaccgtttaagtagagcgacaacaagagctttgtggttaccccaggtggtgaggagttagagtttatacatgcagtgggctattcgtttgtgagaaattctccttgctgaactagtcagatttttttccccttcctttgaaatgaccacatctgtttttctgagcatgagaagaaggtacagtacattctctctctctctctctccctctccgtctccctctccctctctctctctcgtcctctctctgctgtacattctttaccaggatgcgatattgaaaagcaagcatgaccttttgttattttgagatgggttctcactctgtagaccagactggccttggattcagagatccacttgcctgtctccctactgctatgattaaacgcatgccccaccatgcctggctgaacacatcctttttaattacgtaaaatgtgggagaggatcacatttttatatacgttcaggacccaactgaataaaagaaatatttttattcaatctatgagggttttttttttttttgtctttctgtttgagtataaatttcataccagatggtttctcctgctgcttgaaggatatgaggtataaggcatgttcttctatttgtaagggactagattgtcagatggacttatggggcagccactctctgaccactgagtttctttattaacccactcgcctgaataaatctgaagggccttttgttgttgttataaactcaaatttgactctgccactatgtgtgctatccacttgcctgtagaggccagaggaggacattgtgtctgctctgttcccctcctcctcggttctttgagacaggacctctcacggaaccaaagcttatggttttcttagccagattggctggccagcaagcctcgagatccttctgtgtcctctcaaaccaacatcggaattgtgggcacatcgagtggtacatggctgccagggatctaaacacatcctcacagttgggtagcaagtgcgtttcccactctgccttctttcctgcccccccccccccccccagagctaattctaagttgctgatgtttggtggccgcagattcatctccacacagcccttttgtggcccttactatgccggcccgttctcctttagacttacgggacacgtcagattgtgctggagaaagaggagacagaggagctgaagcggtttgatgagccaggtttgatcctcatgggctttaagcccacggtgatgctgaagaagcagcactacctgaggccctctctgttcgtgtacccagaggagtccctggtcagtggtgagtgccgagactccctgctcagatccctgggaaagggtcaaagtgtagacaccctattttgggggacgtccctggtaaatggttgttcaagggacagccagcgcctgtcactgggtttgttgggctgtgtttcctaaatggctgagatacctacaagagatgcagctggagtaaaaagaaggaggaggaaaaaagaaagaaaacctgtaagactgtgctgggcgtgaggggagaaggagatgcaggccactgagacagttgtgttttagggagctcaaccttgttcagcgctctgctcaccaagtgtgtggagaagaaggtcatagcagtgtgtagatacacaccccggaagaacgtctccccgtattttgtggctttggtgccccaggaagaggagctggatgatcagaacattcaggtgactccaggaggtatgtggcagagaggtcccttgggggtcctgaagcacctgagtcccctagcatcaattaggccacggaaatgtgtgtttaaaagccttaaaaggttttgcaggtccactcgacaaggccaccaagatggttgtgtggagagagaacatagtcaggcttcaagattgtctccatcctgactatttgcacatagtcaggcttcaggattgtctccattctgactatttgcacatttctgctgcaagtggcagggcttctcgctgatatttttctttattgaaagtgtctcatcacccttcatggttggtttttgtcctgtaagtgccaaggttatgtggtgtaatgtaaactgcttagctatttgaagtcagtcttgctttagtctcttcttagcccctccatacatggtctcactatgcagcccaggctaggatttgtgttcctcctgcccaagccgtctgagtgctgggattacaggtatgcactgacacacacagctgtgacacacacagctgtgacacacacagctatgactgtcccgtgggatatgtcccggagcttactctcttttgttttagaccctctctgacacttattagccagccaactcgggcacacaagttaaacctccattctcactgggaagctgttctatatttgagataattcagtgttcatgcctcccacaaggtgtccctgatggtcctgcctaaatgcagtcctctcattggaataagcgcttgcttaacctcccagctgcagttccccgtttcaagctgtgtgctgtgcaggctgaccccctaaacccagcagcccagtcaaagtccttatcaatagtagacagcagggggaggctagggagcagaggggagaactggcctgatggctccctcttacttgctcaccacctccagtgctgtcatcaagggcccctcacctggcagcagccttggttgaagtgcctggaattttccttcttgagtccgaaaggaactggactagaatccacataactccttcctctttaatgtatgctggaagctagaatgaaaatggaaagctggagctcagaggagagcccagtgaggctggaacttagccccccaaggatggtactgtccagctggctctggattatctaaaatgaagaggaggaggaagaggaagaggaggataaatagtggctgggaccaaccgctgttgcctggttgtggctccttgttggggcatcccttctctgtcaggcttcatgtgcatccccggagagtctgttagtctgactttcacgcgtggcccctggtaaaggagaaattggatttgtgaccctcagccccagcaccacagtatacagagggacaaacagcagaatcgtaagtgaaatctcagaagacctgtctccccacttcaggcttccagcttgtcttcctcccttatgccgatgacaagcggaaggtgccctttactgagaaggtgacggccaaccaggagcagatagacaagatgaaggccattgttcaaaagctccgcttcacatacaggtgagcgctgggtcacccttgagcattttttggagccttctccagagttgagccttatcagaaattcaagttagacatagactaagagggcatattctcttctgttcagtttgccaaaaccagggaatcattcattagcaccaagaactccaaaagtacataagatcctctgcttagcttttttttggggggggcggggattcgagacagggtttctctgtgtagccctggctgtctttggaactcactctgtagattctgtagaccaggctggcctcgaactcagaaatctgccttcctctgcctcccaagtgctgggattaaaggcatgcgccaccactgcgtggcaactctgcttaccttgtagagtctcagcctgtgctggtagaagccatgtgtggtggtatgtacctgtaaccccagccttttctaattgatactggagcattacatatttgaggcaagcctgggctttcttcagaaaagaaaggctagttgtttaacaagttcaaaaagacacatgcttatttagtttcttgtttggttagatgggatcttactccataaattaggctagcctagaactcactgtatagctaggctagactcaaatttgcagtattccatctgccccagtgttctgaatgctgggattgcaggtttgtggcacgacgcccccctacctttgtaagacttatttatttttattttgtgtgtgtgtggaggggtaagcatgcatgtggatatatgcaccactgtctatgactagtgttcaaggagttgcatcctctaggactggagtgaaagctggcttgaactgccacataggtgctgggaactgaacccacgtcctctacaagggcagcaagtgcccttgattgctgtctctccagccttcgagcatacattcattcattcattcattcatttatttgtttatttcgagacagggtttctctgtgtagctctggctgtcctggaactcactctatagaccaggctagccttgaactcaaagttttgcctgcctctgcctcctgagtgctgggacacgggccactgcagcaggctctcaggtcactttttattaatggaaaacatctcttaaagcctgcatatgattgcagacacctgtcacatgccatgtttttcagtttgtattttctgtatgatacccacctcctttaagagttcactgtagagaaaccacagggcaacgatgctgtgctgccctttgtcctcttgcccagctgcagtgtgagacccgctggttagctgctgtcccctcccagccctcggcctccgccactctctgttcctgagagttgactgttgcagatgtgcacatgagaactgagtctgttctcagggtagtgtcatatagactcagcagtgctggtgtgcgctgtctgcatttcctcctgtcattaaccaaaacatcttttcgaaaaagattggttttttatttgatttatgtatatatgtttgtgcatcatattgtagcatgcacggggtcagaagagggcattggattccttgaaactggagttacagatggtggtgagcagctatgtgggtgctggtcctctcgaagaccaagagccgtctttctggacccttctttttgttttttgttttttttttttgtttgttttgaaggctaatcttctaatatacttaaatatataccatactatattcttaatatatatttatataacatatataatatgctattttgtttaattaagtggaaggtttctatgttttggctgttataaggagggttctaatgaaatggtggtgttaatatactgttgttatcctaagttcaatttttggatagttctattattttttaagatttatttattgttatatgtaagtacactgtagtagctgtcttcagacacaccagaagagggtgtcagatcccattacagatggttgtgagccaccatgtgattgcgggatttgaactcaggacctttagaagagcagtcactgctcttaaccgctgagccatctctccagccccagatagttctatttttatttaaaagacatatctttattatttattttgtgtttgaccaattcatggttagagaagaacctaaaggagtttgctctctccttctgtcacgtgggttctggggattgaactcaggtactcaggcttggtagcaagtccctttgtcttaccagctccttatttgaaaggttttacaattttatgtattatctgtgtgtgtgtaagtaatgtgtatacaactctcaggaattggttgtcttccactgtgggttctgagatcaaactcgagttgtcagccgggcagcagcaagccctggaagcaagtgcttccacctgctgagccacctcactggtggcagctttactatttgaggaccctccatacagttttccatggttccttacctgttttgcatcttcaccaaaaggtttccagtttctccccatgctggccacgctccttgtcttcatttttgtttttagagacaatatttattactcattgtggtgggccatgccaatagctcccggctcggaaggtggaggcaggagcattagcagttggaggtcatccttgattatagtgagttcagggcttggtttgggatacatgacatcatttccaggtgggaggacagacagagggaggaaggacagacactgactcagtgtgtagtcctgcttgtcctcatactggtctgcttactactgactgtctcctgagcgctggtctagaatttgctgtgtagcctaggatgaacctgaactactgatcttgccctaacctctccatgctgggattccaagcaagtgccaccatgccaggtttatttggtgtcaggagttgaatccagggcttcgaggctgctagtcactctgagacgtgaggtgatagctcatcgtggtttcatttatatttccctaatgatagctaatgacagttgaacaactcatatgtcttggccatttgtatatcttctcaggacacatggcgtggctttttggtttttgttttgttaactttctaagacatggtcttgctctctagcccagagttgcttgggtgctggaattagcagcttgcatcaccacgcttcagttgtagactgttttaaagtcaattttaaaaagtcagatttttttctttattttctcatcaagttagagcccttttcacattccatctttgctatctgttacttctagttctgggcaaatgatccttttcattgggtgtggcatccacctgtaatccctgcatggtgagcagtggagggaccaggaattcagggtcatccgtggctacacaataagcttgacgccagcttgaatgtatgaaaccctgtctcctcccaacccccgccacccaaagaaaaaagaaaggctttccccttcagctctaacttcctgctctactccttcccctgaaagtatgagcgctaagactctaccatggagggctggagatgtaccttcctagcatgtacaagctctgggtttgatctcagatgcatgtctcacaaacatacacaccaccaacaaaaaacattccgtgtgttagacactgttccgcatgcaatactgttgtgggaaatatttaaaaataaacctgcctactctcctctacacacagccacaccgcagtcccgtcctttcatcctcctaagaaattgaaaagggggctgagaggtctaatagttgcacctatgtcaggacacctctgacctctgcaggcatggtgcacacagacacactttaaaaaaaaaagaaaaaaagaaagaaagaaccctgaaaggttggttttgtgcccattttacagatcaaacaggtttagaggacacaaggaccccctgtcagtttcatccaactaggaaagcagtagagtgggacagtggtggtgcatgcctttaatcccagcacttgggaaggcagaggcaggtggatttctgagttcaaggccagcctggtctacagagtgagctccaggacagccagggctacacagagaaacccttttcgaaacccctccccccccccaaaaaaaagtaaagcagtagagagcaggcttcagctctacctgtgtgactctggcttcaatctcctaactcccacgctgctctgtgcacagaagacacagttgtcattctgcatcttctattctcctctctgcctaagcttctagtgacaagccaggtttgctttgttccagcatccactgataaattaaaagttagagggggtctgggggagttgatatggaggtctctgctattcacttgtggtctttttctcaactgcccttggactgccactagctggaggttctgttttcttactggaagttcttatgttttgatgctgtttgacaggagcgacagttttgagaatccagtcctgcagcagcacttccgcaacctggaggccctagctttggacatgatggagtcggagcaagtggtagatctgacacgtaagagatgtggattgagccagggagtcctttgtgtgttggtgccggggattgaacacgtgggtaggagctcttcctctttggtgagctacatccttagttgagaacactctttaaattaaatcagaggcctgggcctgtctcagctccaagcagtgctgctgtgagtgtgtactggaggaaccgcaatagaagaccgcttgtttggctgatgctgctctgaccagtaatctggatgtgttttgtttttttttaaacattttttaagatttatttatttattatatgtaagtacactctagctgtcttcagactctccagaagagggtgcctgatctcattacagatgattgtgagccaccatgtggttgctggggtttgaactcaagacctttagaagagcagtcagagccgggcgtggtggcgcacacctttaatcccagcacttgggaggcagaggcagggggattcctgagttcaaggccagcctggtctacaaagtgagttccaggacagccagggctatacagagaaaccctgtctcggaaaacaacaaaaaaaaaaaaaaaaaaaaaaacaaaacaaaaaaaagaagagcagtcagtgctcttaaccactgagccatctctccagccctggatgcggtttttttttttttttttttttttttttttggttcttgttttttgttttttaaatgtctccaaacctccttgtccagaccgtctccgcctgacaggttttctaggtcaccttagactgccttgaacagattgagctagctctgcagtgacaggagagtggcaggctcccgagacctgactctgaactaactaggtcaccccatgtctatgtgtgactgctgataacgttgactaaggctgacagtggcaggcactgttgtcctgtgtgctgattcagctgacataattccgaagcaggggctttaagagaaggaatgatttctctaagttacaggtgcggagcattcagaactgggtgcacgagatattactgagtctgcctgcgcccggaaccactgtgcttgctctgccctgtcaggcctgggctcctggccttctttctagacctcttcttgatggtggtgctctcgcatgtttatgagacgtggactgtgacagggaaacgagtagtccctggaagcagtctggacttaatgaaggtccttgtaacagttaataggaccagaacaattagtctcgcctgcttagcttcccagttgtccatggcctcttaataccagacaaaatagctgttgttataagcagtcatggtggtggggactgtctagctgagtttagcaaaagacaatccttaggttcagcagcctgtgaggaaggactacctccatgtttgctcttggtgacttgaaggatgcgagagtatgtgtgtgggctatatgtaaatactgcaccatttaaataagggggactggcacttgccaggatttgggaatatacggaggtccctcacatagcatgccaggcatgaagaatgtctgaagggttttgttgcatgttttaatggtccagtcagctgccttgtatccagcccttccctcagcccaattcagtgctctcttgttccccacagagctggaagtggcaggtctcttggatgtacataactcacctgaatactgtgttgttttgattttctagtacccaaggttgaagccataaagaaaagactgggttccctggcagatgagtttaaagaacttgtctatcctccaggttataatcccgagggaaaagttgccaagagaaaacaaggtaagggctgggtgtggatagatgcatatgctccctttaaaggtgcttcatggtcttacctcacggtgatttgtctcctttctcttcattttgggaatggtggtgggtgtactgtgggggtgaggaggtcaaagtcaggacttcacacaagcaagcaagcagtggtatcactgagctgcagccgggtcttctcagaaatttgtatatatggcataccgtggctcagtgttacaaatccttgcctagaaacttctacacaactgcattttggcacaaatggagtgcttatattgtttccttgtgtgggggagggagaggtagtatgggcacatttgtgccatggcacatgtgtgcagcttgaagcacaactctgtggagtcagttttcttccatccttatgtggtttatatggcaaatacttggatctgatgaaccattcactagcccactattttacaaaatttcttttagatttatcttattactttatgggtgttttgcctgtagaggttagaagagggtatcagatctctgggaactggagttccaggtggtcatgagctaccatgcaactctgggtaccaaactcattttgcaagagcacaaaatgtacttaaaccttaggccatctccagtttctctacctcatctttaaaaattaggctgctgggctggagaagatggctcagtggttaagaacactgactgctcttccagaggtcctgagtttaattcccagcaactacatggtagctcacaatgggatctgatgctctcttctgacatgtctgaagctacaatgtactgtattatatatatataaaataaatgctttaaataaataaatccttttaaaaaaattaggctgctgagatggctcagtaaggcatttgccctgtgcaagtctagtaacctgagttgcctccctggaacccaaataaaagtgggaggagagaactaattccacaaagttgttctcctatgtccacacacccaaatacacaataaaaatgtttttaaagttaggttgcagtctacttagggtaggtcagtggctaggaatccctgcttcttatttaatgagacctctttttagggcatattctacagtgaactagtcaatgagagacccgacatcaagggaggaaggtggggaggcagagatgaggactcaacatcctcccctctggcttctacaaagacatgcacctatacccaaagcaagccagtaaggaacatctctccatggcctctgcatcagtaggctccatgagccatctttctagcccctaattatctaaatttctataaaaggaagtgacagagggaatatatgccctgctttgatgtctatgtagttctctagttgggagtggagtagtttcattaggcttttttctacctggtctctgatcctggcactgaccacttgctataggacagggcttattactggtagaccccaagcttcctctactatgaggaagaagcacttgtaaagcagcactgggcacagtcaccattttggaatggttctggattggtcttttgactaagtcaagtcatatttaagccttgttacctaatacatccatgaagaaagccaggtcagactgggaccatcctgcttgtaccattttgcatcagaaccaactctgtcatgtcctggaagttgtcatcagacattgtctgtggttttttgccctgctggttttattgcctggtgcctcagaacttaacacaatgtttctcaatgttttttccccttaccctttggatgtgctggaatttaaaatggggtctagcaatgctgtacttctagtccctgtacatttttttgggggaaaagaagcagggcagtggtggcgcatgcctttaatcccagcacttgggaggcagaggcaggtggatctctgagttcaaggccagcctggtctacagagtgagttccaggacagccagggctatacagagaaaccctgtcttgaaaaaaactaaaaaaaaaaaaaaaaagggggggggggataggcttacagagaatgagcagcggttttacatatgcaacacacaccataagagtgcacagtgccatgtagctgggctatcactggaagcatttccaggtctttccttcctgtctcttttctctagatgatgaaggttctacgagtaaaaagcccaaggtagagttatcagaagaagagctgaaggcccattttcgtaagggcacactgggtaagctcactgtacctacactgaaggacatatgcaaggctcatgggcttaagagtgggccgaagaagcaggaactgctagatgctcttatcagacacttggagaagaactgactaaagctcagaagcccagccactttctacactgcagccaggccacctgcttgtgttcttaccaagctaggtggtagctacaaagagctacttaagtgcaaaatcatggagattacagtctcccacctcactgtgccttactctgtgaataaag

SEQ ID NO: 167 - DNA, 2170 bp, Mus musculus
agtttagggaacagggggtggaagcgggaaatgcgagtgggcgtgcccgcttgaagggtcgaagggcgtgttgtgcgtgatgacgcaacgtcgctgattgggcgagagacaaggagcccgcgtggacgtggtgcccaccttctgctgtcccagtggcttgcccgcctgcggttaagtgagcaaaccaacatgtcagagtgggagtcctactacaaaactgagggcgaggaagaggaagaggaggaggagagccccgacacaggtggagaatataaatattcaggaagagatagcttgatttttctggttgatgcctccagggctatgttcgaatctcagggtgaagatgaactcacaccttttgatatgagcatccagtgtatccagagtgtgtacaccagtaagatcataagcagcgatcgggatctcctggcagtggtgttctatggaaccgagaaagataaaaattcagtgaatttcaaaaatatttatgtcttacaagatttggacaacccaggcgctaagcgagtgctagagctcgaccagtttaagggacaacaggggaagaagcacttccgagacacggttggccatgggtctgactactctttgagtgaagtgctctgggtctgtgccaacctcttcagcgacgtccagctcaagatgagtcacaagaggatcatgctgttcaccaatgaagacgacccccatggccgtgacagtgctaaagccagccgggccaggaccaaagccagcgacctccgggacactgggatcttccttgacttgatgcatctgaagaagccaggaggctttgatgtatccgtgttctacagggacatcatcaccaccgctgaggacgaggaccttggggttcacttcgaggagtcaagcaagctggaagacctgctaaggaaggttcgagccaaggagaccaaaaagcgagttctgtccaggttaaagtttaagctcggtgaagacgtagtactcatggtgggcatttataacttggtccagaaagctaacaagccttttccagtgagactctatcgggaaacaaatgaaccagtgaaaaccaagacaaggacttttaatgtaaacaccggcagtctactcctgcctagtgacaccaagcggtctctgacttacgggacacgtcagattgtgctggagaaagaggagacagaggagctgaagcggtttgatgagccaggtttgatcctcatgggctttaagcccacggtgatgctgaagaagcagcactacctgaggccctctctgttcgtgtacccagaggagtccctggtcagtgggagctcaaccttgttcagcgctctgctcaccaagtgtgtggagaagaaggtcatagcagtgtgtagatacacaccccggaagaacgtctccccgtattttgtggctttggtgccccaggaagaggagctggatgatcagaacattcaggtgactccaggaggcttccagcttgtcttcctcccttatgccgatgacaagcggaaggtgccctttactgagaaggtgacggccaaccaggagcagatagacaagatgaaggccattgttcaaaagctccgcttcacatacaggagcgacagttttgagaatccagtcctgcagcagcacttccgcaacctggaggccctagctttggacatgatggagtcggagcaagtggtagatctgacactacccaaggttgaagccataaagaaaagactgggttccctggcagatgagtttaaagaacttgtctatcctccaggttataatcccgagggaaaagttgccaagagaaaacaagatgatgaaggttctacgagtaaaaagcccaaggtagagttatcagaagaagagctgaaggcccattttcgtaagggcacactgggtaagctcactgtacctacactgaaggacatatgcaaggctcatgggcttaagagtgggccgaagaagcaggaactgctagatgctcttatcagacacttggagaagaactgactaaagctcagaagcccagccactttctacactgcagccaggccacctgcttgtgttcttaccaagctaggtggtagctacaaagagctacttaagtgcaaaatcatggagattacagtctcccacctcactgtgccttactctgtgaataaag

SEQ ID NO: 168 - protein, 602 aa, Mus musculus
MSEWESYYKTEGEEEEEEEESPDTGGEYKYSGRDSLIFLVDASRAMFESQGEDELTPFDMSIQCIQSVYTSKIISSDRDLLAVVFYGTEKDKNSVNFKNIYVLQDLDNPGAKRVLELDQFKGQQGKKHFRDTVGHGSDYSLSEVLWVCANLFSDVQLKMSHKRIMLFTNEDDPHGRDSAKASRARTKASDLRDTGIFLDLMHLKKPGGFDVSVFYRDIITTAEDEDLGVHFEESSKLEDLLRKVRAKETKKRVLSRLKFKLGEDVVLMVGIYNLVQKANKPFPVRLYRETNEPVKTKTRTFNVNTGSLLLPSDTKRSLTYGTRQIVLEKEETEELKRFDEPGLILMGFKPTVMLKKQHYLRPSLFVYPEESLVSGSSTLFSALLTKCVEKKVIAVCRYTPRKNVSPYFVVPQEEELDDQNIQVTPGGFQLVFLPYADDKRKVPFTEKVTANQEQIDKMKAIVQKLRFYSDSFENPVLQQHFRNLEALDMMESEQVVDLTLPKVEAIKKRLGSLADEFKELVYPPGYNPEGKVAKRKQDDEGSTSKKPKVELSEEELKAHFRKGTLGKLTVPTLKDICKAHGLKSGPKKQELLDALIRHLEKN

SEQ ID NO: 169 - DNA, 42794 bp, Homo sapiens
agggggcgttgattgggaccgagtacagggcccgcgcatgcgtggattgtcgtcttctgtccaagttggtcgcttccctgcgccaaaggtaagcgggccgttatccatttgtgttgttcgccagctaggcctggcctcgtcccgcttcgctcggtcggtctcgcgcgcccccatagccttgctagagggttagcgttagccttaagtgtgcgaatccgaggagcagcgacagactcgagaccacgctccttcctcgggaaggaggcggcacctcgcgtttgaggcccgcctgcgtttgaggcccgcctgcgcttgcggcccgcctgcgcttgaggcctgtctgcgtttgagatctcattgggcgtgattgaggaatttggggaggtttttgggcggtattgaggacgagggggtccgttagtcagcatagaatcctggagcgggaatccctcaccgtctaaatggcgtcgggggcgggacctccgggatctggcttccgcgggccgccgccggccctgaaacgtgagggatagctgagatgaggcagctactgggatggcccccatgcgcatttacatgcagtccgactgccgagctttcgaggcagcaggatttaccgtccacattcctcactactaaccaagcttttagaacagatctcacaagaacctagaggtcggtattttttcgatttaaatttgcctgttactgacgttaacgtctttcgcctagtgagcagtagccaacatgtcagggtgggagtcatattacaaaaccgagggcgatgaagaagcagaggaagaacaagaagagaaccttgaagcaagtggtaagtgacttcagcatgtagtgccattcggtgtgtggaagaaagaccttccctgcctatctctgctggatggactttgctgtttgatggcctgcccttctcctcccagataattctgaaattcttttcttcctttgaacttcgcagagctaccctaggctcttatatgcagatcttactctagtgtgccctaagttttttttggacactggtagtttgacatcttttggtccctgataaatggccatgaccataggtattttttgtcatcttaagtggttcaggtgagacccttctcatccaggaaagtagtgttaccattccaggacctcagtgtaaaaatgcccccaccctgcaataactacaccaaccaaagaataaacgcaagcaacacagttacaggaaagtgattgattccctcactatagcctccacgtttgggagtgtatgtgcaggcaacacagtaacacataaaacaaaggaagagaaataggggtacatgtaatcttcatactggttaatttaactcctgagcagaaaaattttgaatatttttattaaaaatgagaaacggccaggcgcggtgtctcaagcctgtaatcccagcactttgggaggccgaggcgggcggatcacgatgtcaggagatcaagaccatcctggttaacacggtgaaaccccgtctgtactaaaaaaaaaatacaaaaaattagccgggcgtggtggcggtcgcctgtagtcccagctgctcgggaggctgaggcaggagaatggtgcgaacctgggaggtggagcttgcagtgagccgagatggcgccactgcattccagcctgggtgacagaatgagactctctcaggaaaaaaaaaaaagtgagaaacataggaaatacaaaaaagaaaaaaatttgctataatctaccactctaacacaaccactaccagcattttgacatttttgtatttttctttcaagtatctttcaatatttatttcctaatgaaatatatatattttttaattttttaatagagacaggctggagtgcagtggtgagatcatcgtagctcactgtaacctcaaactcccgggctcaagtgatcctcctgcttcagctacctcagtagctgggactacaagtgccgccaactcccaataattttttaattttttgtagagacaggatcttgctatgttgatcaggctggtctcaaactcttggcctcaagcgatacccccaagccttggcctcccaaagttctaggtttatagtcatgagcctccatgcccagactgtatctgatttctttttctttttttttggagacagtcttgctctgtcgcccaggctggagtgcagtggcgcgatcttggctcactgcaagctccgcctcccgggttcatgccattctcctgcctcagcctcccgagtagctgggaccataggcgcccaccaccacgcccggccagttttttgtatttttagtagagacggggtttcactgtgttagccaggatggtcttgatctcctgaccttgtgatccgccctactcagcatcccaaagtgctgggattacaagtgtgagccactgcgcctggcctatctgatttcttgtattgtaacgatagtgcatatacatttatttatttattgagacagagtcttgctctgtcgcccaggctggagtgcactgactcaatctcggttcactgcaacctccgccaccccagttcaggctattctcccatctcagcctcccaagcagctgggatgacaggcgtgtgcgccaccacactcggctaatttttgtatttttagtagaggcagtgtttcaccatgttggccaggctggtcttgaactcctggccttaggtgattcacccacctcggcctcccaaagtgctggaattacaggtgtgagccactgtgcgtggcctatagctcattttaaatataccataatttggccgggtgtggtggctcacacttgtaatctcaataaatatactgtaatttgtctgggtgtggtggctcacgcctgtaatcccaacactttgggaggctgaggcgggcagatcacttgaggtcaggagttcgagaccaccctggccaacatggcaaaaccccatctctactaaaaaatacaaaagttagctgagtctgtggtggcatgcacttgtagtctcagctgcttgggaggctgaggcacgagaattgcttgaaccggggaggcagaggctacagtgagctgagattgcaacactgcactccagtctgggcaacagagtgaaactctatctcaaaaaaaataaaataggggccgggcgcggtggctcacctctataatcccagtactttgggaggccgaggcaggtggatcacaaggtcgggagatagagaccatcctgactaacatggtgaaaccccgtctctactaaaaaaatacaaaaaattagccaggcgtggtggcaggcgcctgtagtcccagctactctggaggctgaggcaggagaatggcgtgaacccgggaggcagagcttgcagtgagccgagattgcatcactgcactccagcctgggcgacagagtgagactctgtctcaaaaaaataataataaaataaaaaataaggccgggcgcggtggctcacacctgtaatcccagcactttgagaggccgaggcgggtggctcacgaggtcaggacatcgagaccatcctggcaaacacggtgaaaccctgtgtctactaaaaatacaaaaaaatagccaggcgtggtggcaggcgcttgtagtcccagctactcgggaggctgaggcaggagaatggcgtgaacccgggaggcggagcttgtagtgagccgagattgcgccactgctctccagcctgggcgacagagcgagactccgtctcaaaaataaaataaaataaaataaaataggtcaggcacggtggctcatgcctgtaatcccagcatttttggaggccaaggtgggcagatcacctgaggtcaggagttcaagaccagcctggccaacatggtgagatcctgtctctactaaaaatacaaaataagccaggcgtggtagcgcatgcctgtaatcctgctactcaggaggctgaggcgggagaatcgcttgaacacgggaggtggaggttgcggtgagccaagatcgcgtcatcgcatgtttaaggttcttgacacacattgccattttgttctccaggagacagctaattaaacttattaagaagcagcaggccatgcacagtggctcacggctgtaatctcagcactttgggagtaggaggctgaggcaggctatcacctgaggtcgggagtttgagaccagcctgaccaacatgatgaaaccccatgtctactaaatacagaaaatttgctgggcatagtggcacatgcccgtaatcccagctacttggagatgaccagacattatatacctttttaggaaaaaatatgttacttatgataaagtcatgctgaagaaagaaaacctgaatcagattaagcctctctaggtccttagtaggaaggacagaggactctgttaatctacaccaaaagaggtcaatcggcaggccaggcaaggtggctcatgcctgtaatcccaatactttgggaggccacggcagaggatcgctcaagcccagaagttcaaggctgcagtgagctatgattgcgccactgcattccagcctgtgtgagagaacaagactgtttctaaaataattaattcaataattttatttttttatttgagatggaatctctgtcgccaggctggagtgcagtgactaatctcggctcgctgcaatctctgcctcccaagttcaagtgattctcctgcctcagcctccctagtagctggaattataggcatgcgccaccacacacagctaattttttgtatttttagtagagatggggtttcaccatgttgtccaggatggtctcaatctcttgaccttgtgatccacatgtctcggcctctgaaggtgctgggattacaggcatgagccaccgtgcttggccatttatttatttttattttttttgagacgggttctcgctctgtcacgcaggctggagtgcagtggcgcgatcttggctcactgcagcctctgcgtcccagattcaagcgattctcccacctcagcctccatagtagctgggattacaggcatgcgccactacacgcagctaatttttgtatttttagtagagatggggtttcaccatgttgtccaggatggtctcaatctcttgtcctcgtgatccacatgcctcggcctcccaaagtgctgggattacaggcgtgagccactgtgcccagccaaaataattttttattttttatttatttttttgagacagagtcttgctctgtggcccaggctggagagtagtggtgtgatctctgctccctgcaacctctgcctcccaggttcaagtgattctcctgcctcagcctcctgattagctgggattacaggtgggcaccaccacacctggctaatgtttgtttgtttttttttttgttttttttttttgagaccgagtctcactctgtcacctaggctggagtgcagtggcgtgatctcggctcactggaagctccccctcccgggttcatgccattcccctgcctcagcctcccgagtagctgggactgcaggtgtccaccaccacgcccagctaatttttttttgtatttttagcagagacagggtttcaccgtattagctaggatggtctcgacctcctgacctcgtgatccgcgcgcctcggcctcccaaagtgctgggattacaggtgtgagccactgcgcccagcctaatgtttgtattttcagtagacacagggtttaaccatgttggctaggctggtctcgaactcctgatctcaagtgatcctcccgccttggtctcccaaagtgttgggattacaggcatgagccactgtgccccgcctaattaatttttttaaaaaggcaatcagcaaaattcagaatgtggaaaagtgtataacacaaagcatcttggctcttcagaagataaattacaagggaaaaaagagagggtatctgtagatgaagaggctttagaaaattaagtcaaagctaatgtttagaaatgtaggtttgggtgataaaattataaagaaacgtaaggggtgggtgtgtggtagatcatgcctataatcccagctcttaggccagggcggggtggggtgcggtggctcacgtctataatcctagcactttgggagtctgaggtgggtggatcacctgaggccgggagttcaagaccaacctgggccaacatggtaaaactgcgtctctactaaaaatacaaaattagctgggagtggtggcgggcgtctataatcccagctagttgggaggctgaggcaggagaatcgcttgaacctgggagacggaggtcgtagtaagccgagattgtgccactgtactccaccctggcaacagagcgagactccgtctcaaaaaaaaaaaaaaaaaaaaaatagaggcctggtggggaggattgcctgagctcagaagttttagatcagcctgggcagtgtagcacaataccatctctacagtaaacttaaaaaattagctggtcatggtggcacacacctgtagtcccagttgctcaggaggctgagtcaggatgatggcttgagcccaggagttcgaggttgcagtgagctatcatcgcgtcactgcactccagcctgggtgatgggagtgtgaccctatctcagaaaaaaaagtcaggatattgacttttttggggaggtgggtgttgtaattgggagggaatgtaagagggatttctggggtgtctggcaagactcaatttcctgacataggtggagattttatggttgttcaccttataataatttattaggttatactttcctttatggcctttatttatcttatatggtaaacaaatacgaaaacaaggacaaacattttcttccatttttttccccataggagactataaatattcaggaagagatagtttgatttttttggttgatgcctccaaggctatgtttgaatctcagagtgaagatgagttgacaccttttgacatgagcatccaggtaagactaccttttaatttaagacaaatttaaaaacagtattggctgggcatggtggcggctcatgcctgtaatctcaggacattgggaggccgagacgggcagatcacttgagcctaggagtttgagaccaacctggtaacatggagaaaccccgtctctacaaaaaatacacaaatcatccaggtgtggtggtgcaaacctgtagtcctagctactcaggaggccgaggcgagaggcttgcttgagcccaggaggtcaaacagaaaaaagaagtaggctcctcctcttgcagagatggaagtataaaggaagaagggaagttcccacagttatagtgtggaaaagagtgagtgatacttgggagttgactactgcctgtggttggggaagatggctacaataaaaaggcaacttcaattttaaaacaggcacaggacttgaaaagacatttctccagctgggcgtggtggctcatgtctataatcccagcactttgggaggctgaggcaggcggatcatgaggtcaggagaccagcttggccaacatggtgaaaccctgtctctactaacaatgcaaaaataattagccaggcatggtggtgcgcttctgtagtcccaggtactcgggaggctgagtcaggagaatctcttaaacccaggaggcggaggttacagtgagccgagattgtgccactgcactccagcttgggcaacagagtgagactctgtctcaaaaaaaaaaaaaaaaaaaaaaaacaattctccaaagatatgcagatgtccaacaagcacaggaaaagatactcagcatgtttagtcattagagaaaggcaaatgaaaaccataatgagctaccactcacacccactatataaacaaactaaaatttaaaaaacaccagcagaaaataagtgttggcaaggctgtggagaaattggcgtgattgactgtacctgacctgttcttgtttctttaaattgaggttgtgtttcatgtaacataaaattaactatttgaaagtatacaattcagtgacacttaacacattcacaatgttatgcagccaccacctctatcttattccaaaacattttgaatggctaaacagtggcatatagatatacattccatgaaaaggaatgaataattgatacatactacaaagtagatgaatcttgaaagtattatgctaagtgaaagaagccagatacaaaaagtcaaatattgtatgatttcatttacatgaaatatccagaataggtaagttcttaacgcagaggggtggttggttacctgaggcacagggaagagaggaacagggagcaactgctcaatgggtatggggtttgcttttggggtgatgaaaattttttggaactagagttggtagttgcacaacattgtgaatgtttgtgtgtgtatttatttatttatttatttttattattatttttgagacggagtctcgctctgtcacccgggctgtagtgcagtggcgtgatcttggctcactgcaagctccgcctcccgggttcatgccattctcctaccttagcctccagagtagctgggactacaggcacctgccaccatgcctggctaattttttgtgtttttagtagagacggggtttcaccgtgttagccaggatggtctcaatctcctgaagtgatccgcctgcctcggcctcccaaagtgctgggattacaggtgtgagccactgcgcccagccttgtgtgtgcatttatgctttttttttttttttttttgagttggagtctcgctctgtcaccaggctggagtgcagtggcacaatcttggctcactacaacctctgactccctggttcaagcgattctcctgcctcagcctcccgagtaggtgagattacaggcacgtgtcaccatgcccagctaatttttgtatttttagtagagatggggtttcaccatattggccaggatggtcttggacccctgacctcgtgatctgctcgcctcggccttccaaagtgctgggattgcaggcgtgagccatggcacccggccttgctttttttttttgagatggtgtctcactattgctcaggctggtttggaactcctgggctcaagcaatccacccacctcagcctcctgtgtggctggggttaaggcatgtgccactatgcctggcacattgtgaatgtattaaatacctcttaattgttcacttagaaaatctaaatttcagcttaattaaaaagattagtgtttctttttttttttttttaatttattttttttattgatcattcttgggtgtttctcacagagggggatttggcagggtcataggacaatagtggagggaaggtcagcagataaacaagtgaacaaaggtctctggttttcctaggcagaggaccctgaggccttccgcagtgtttgtgtccctgggtacttgagattagggagtggtgatgactcttaacgagcatgctgccttcaatccatttaaccctgagtggacacagcacatgtttcagagagcacagggttgtggggtaaggtcacagatcaacaggatcccaaggcagaagaatttttcttagtacagaacaaaatgaaaagtctcccatgtctacttttttccacacagacacggcaaccatccgatttctcaatcttttccccacctttccccgctttctattccacaaaaccaccattgtcatcatggcccgttctcaatgagctgttgggcacacctcccagacggggtggtggctgggcagaggggctcctcacttcccagtaggggcggccgggcagaggcgcccctcacctcccggacagggctgctggccgggtggggggatgacccccccacctccctcctggacggggcggctggcagggcggggggctgacccccccacctccctcccggacggggcggctggccaggcagaggggctcctcacttcccagtaggggcggctgggcagaggcgcccctcacctcccggatggggcggctggcctggctggggctgaccccccacctccctcccggacgggtcggctgctgggcggagaggctcctcacttcccagatggggtggctgccgggcggaggggctcctcacttctcagacggggcggctcccggacagaggggctcctcacttctccgacggggcggttgccgggtggagggtctcctcccttctcagatggggcggctgggcagagacgctcctcacctcccagacggggtcacggccgggcagaggcgctcctcacatcccagacggggcggcggggcaaaggcgctccccacatctcagacgatgggcggccgggcagagaggcgctcctcacttcctagatgggatggcggctgggcagagacgctcctcactttccagactgggcagccaggcagaggggctcctcacatcccagacgatgggcggccaggcagagacactcctcacttcccagacggggtggcggccgggcagaggctgcactctgggcactttgggaggccaaggcaggcggctgggaggtggaggttgtagcaagccgagatcacaccactgtactccagcctgggcaccattgagcactgagtgaaccagacaccgtctgcaatcccggcacctccggaggccgaggctggcggatcactcgcggttaggagctggagaccagcctggccaacacagcgaaaccccgtctccaccaaaaaaatacgaaaaccagtcaggcgtggcggcacgcgcctgcaatcgcaggtgctcggcaggctgaggcaggagaatcaggcagggaggttgcagtgagccgagatggcagcagtacagtccagcttcggctcggcatcagagggagaccgtggaaggagagggagagggagaccgtggggagagggagaccgtggggagagggatagggagagggagagggagagggattactgtttcttttgtgtacttcgtagagaagaattttcacagatttattatatatctcatgtctcataattttagaatttggaactgaacagaaacttttcatgttctaatttgtgtacaaatagttcttggtaggcagggtgtggtggctcacgcctgtaatcccagcactttgggaggctgaggtgagtgaatcacttgaggtcaggagttcgagaccagcctggccaacatggtgaaattctgtctctactcaaaatacaaaaattagccgggcatggtagtgcaggcctgtagttgcagctattcaggaggctgaggcaggagaattgcttgaactggggaggtggacgttgcagtgagccaggatcacgccactgcactccatcctgggtgacagagagagactccatctcaagaaaacaagaaatagttcttgtagttggcacaccagaatatcttgcaccaaaaaaaaagaataagctgggtgtggtggtgtgcacttgtagtcccagctactcaggaggccggggtgagaggattgcttgagcccaggagtttgaggctgcactgagctatgattgtgccagtgaactctagcctgggcaacagagtaagaccctgtctcttggaaaaaaaaaaaaaaagaaaaggctgggcgcggtggctcatgcctgtaatcccagcactttgggaggccgaggtgggcggatcacgaggtcaagagatcaaaaccatcctggccaaaatggtgaaacctcgtctctactaaaaatacaaaaattagctgggtgtggtggcgtgcgcctgtagtctcagctactccagaggctgaggcaggagaatcgcttgcacctgggaggcagaggttgcagtgagccgagatggcactattgcagtccagcctgggcaatagagccagactctgtctcaaaaaaaaaaagtgtatgtaaaataaaataatagaactatgaataaaaacaatcgttaatttaaagtggttctcaaacagaattacttgcaggacattaaaacacagactacagaaccttgccccacaatcaaaatttctgattctctatgtctagaatggggaccaagaatttgcatttctagtaaattgtcaggtgatgctgatgttactgatttggagaccattactttgaagagcagtgctttaaccttttttagaccgtggacctatttttttttttttttgagacggagtctcgctttgctgccctggctcttggctcactgcaagctctgcctcctgggttcacaccattctcctgcctcagcctcctgagtagctgggactacaggcacccaccaccacacccggctaattttttgttcttgttttttagtagagatggggtttcaccatgttagccaggatggtctccatctcctgacctcgtgatctgcccacttcggcctcccaaagtgctgggattacaggcgtgagccaccgcacctggccaaccgtggacctctttgaggatatgatgacagctacataccttcccctcaaaaaagatagtactcacaattctacctgtaatttcagagagttaatggaacccttgatgcctaaagacctcagaagaaaatgtagtgttaggtaggaaggaaatgagacattcatagatgagcacaatttgataaccgataataagtattcagtagttgataagcaatagaaaacattttctaaaattctgttttagtttttgtttttaatttttagaacctaaaaggagcccttaccagattcttttaaaagtttgtagactcctcagagtagattaaaatatttatggaaatgactacttgccatgtggattgttgtcagtgactagctatagtacatgttctgcatttaaggagagaatagctgtggacgaaggccagctagagctcaggcaggacatggaggggatcaccatggttggtttattcctcagctttgcaggttccaaaacttaatttttttttttttttttgagacagggtctcgctctgtcatctaggctggagtgcagtggcatgatctctgcccactgcagccttgacctcctgtgctcaggtgatcctcctgcctcagcacccctgagtagctgagtagtggggactacaagcatgtgcatgcccagctaatttttttgttttttgtagagacattgttttgccatgttgcccaggctagtttcaaacttctgtagcaatcctcctgtgttggcctcccaaagtgctgggattataggcatgagccactgtacctggcccgaagacttaattttgttagtgctccagaattaggtaggcccctagaactgatgaactctcttttttttttttttttgagatggagtctcgctctgttgcccaggctggagtgcagtggcgcaatctcagcccactgcaacctccacctcttgggttcaagcgattctcctgcctcaacctcctgagtagctaggattacaggcacgtgctaccacatccaactaatttttgtatttttagtagagttggggtttcaccatgttggtcagaatggtctcgaactcctgacctcgtcatctgctcgccttggcctcccaaagtgctgggattataggcatgagccaccgcgcctgggtgaactgatgagctcttacaagacctgatgtaccagatgctgacattagtttatatagaggggtagacctttcctgttactggaatactgatgtctttaactgggtagttaaacagttttatttcaaggatgcgcttactggtagttattgacttattttcaggtcacatgtacttaagcattgtaattattttatatagtcatcccttgttattgagggaattggttgcaggactccccgtggattccaaaatccgaggatgcccaagtcccttaaataaaatggcatagtatttgcatataacctacacacatcctcccctatactttaagtcatctataggttactcatagtacctaatacaatgcctatgcatcacttcattcacatggcttcaatgtagtacttggcacatggcaaattcaggttttgctttttgaaacgggaatttctttgtttttcctgaatatttgagatttgaggttggttgaatacatagatgcagaaccagcagatatggagggccaactgtgtatataaactctgtttcctgataccaaggtacttgaaagatcacatgacctgtccaaattcagccagttaagtaagtgacatcagtaggactcaactccaggttttctgattccaatgctttgcttcgccccaactcccatagcacaatttcctccctctgatacttcttttccttttttcttgagataaggtctcactctgttgcccaggctggactgtagtggtgcagtctctgctcactgcagccttcacctcctggggtcaagcgatctttcacctctgcttcccaagtaactgggaccctgtgctgccatgcccagctaatttttttgttttttttttgtttggtagagatggagtctcactatgttgcccaggctggtctcgaactcctagggtcaagtgattctcccacctcagcctcccaaagtgctgggattgctacagatgtgagccactgtgcctggcctgaatatacgtattgttaattctctgatttcaatggcagggactgcttatacttctaatgtatacttactgcattctggtttttgttaaaatttgatatttatggccattactttcactgattcattacccctgaaggtagggatcttgccttattttagtgccatatacaaattcagtgcacatattttgagcaactaataggtactgagcacttatggagcttccatttagtggtaagtaaatattaattgaattttttttttcagtgtatccaaagtgtgtacatcagtaagatcataagcagtgatcgagatctcttggctgtggtgttctatggtaccgagaaagacaaaaattcagtgaattttaaaaatatttacgtcttacaggagctggataatccaggtcagtaatattttaagatcagcttttcccttatatatgagaatatcagtactctgatcaaagaggactgtggagaaggaagcaagttacatcttgtctaggagtatgctttcctccataaggggaccttgctcgatgtggactttgttaaatgggttaaacagctctggggtgaaaaagggtccttctgttagtcttgtggtaaaggcagccactgacattcttctgatttttctttccatttgactccctgcctctgatcaggtgcaaaacgaattctagagcttgaccagtttaaggggcagcagggacaaaaacgtttccaagacatgatgggccacggatctgactactcactcagtgaagtgctgtgggtctgtgccaacctctttagtgatgtccaattcaagatgagtcataagaggatcatgctgttcaccaatgaagacaacccccatggcaatgacagtgccaaagccagccgggccaggaccaaagccggtgatctccgagatacaggtgggcatatttccccgttctcttaaattggcacttaattattgtttttttattttttatttttttaggagttcaggagtcttggctcagcctcagcctcccaagtagctgggactataagcatgtgctgttgtgcccagtgcagttttattgctttctgtgtacctgacttcaggcatgtgctttttaccatttagaataaaataaaaaaataaagtgaagccagaagatgcctgtgtaacattaacactgcagatggccatgccattagctgtctaaaggactctgtcagaacaagattgtcttgattttttttttttttttttttttgagacggagtctcactctgtcccccaggctagagtgcagtggcacaatcttggctcactgcaacctccgccttccagattcaagcgattcacctgcctcagcctcccaaatagctggaattacaggcatgaaccactgtgcctagctaatttttgtatttttagtagagatgggggtttcaccacgttgaccaggctggtctcgaactctggacctcagatgatccaccacctcgccctcccaaagtgctggggatgacagatgtgagccactgtgcctggccagttgtcttgactttaatattaccacgaatggtgattatttgaaaagttgtctgaagtcattatagcagttggtttccttagtcactttttctaagtcctgaaaatgttaatagtctagttttcagggagcttttaaaagcatgtttcagttttaactgaaagaacttctcacttgctgaaaattgttttttcctccctcacttttgtttacccttgcaacaggcatcttccttgacttgatgcacctgaagaaacctgggggctttgacatatccttgttctacagagatatcatcagcatagcagaggatgaggacctcagggttcactttgaggaatccagcaagctagaagacctgttgcggaaggttcgcgccaaggagaccaggaagcgagcactcagcaggtgtgcactcagcccgggtcagctgcctacactgcccttaaatcagaagcaggctgggcgcggtggctcacacctgtaatcccaacagtttgggaggccaaggcaggcggattgcttgagcctaggagttgagaccagcttgggcaacatggcaagaccctctctctacctaaaaaaaaaaaaaaaaaaaatcagaagcaatgcactgctacacattgcttaacaaaccagaagcaatacattgctctgacctgactggctacttaactcgactatgccactgcctcactgtcttcctctaaaatagtttatttcaggatagcagaagctatttgctgctttatctctggcaagagctggcatgatatttctctaaagtaacacagccctccatttcgtgggggtagacagttatggtctaagagtatccttagctgtactcactagtacagtcatgtgttaattaatgatagggataccttcttagaattgcgtcattaggcgattttgtcattgtgcaaacatagagggtacttcacacacccagagagtacagcttgactacacacctgggctgtgtggttagcctgttgctcttaggctacaaacctgtatagcatattaccatactgtttactgtaggcaatggtaagtatttgtgtatctaaatgtatctaaaggtatagaaaaggtacaataaaaatatgatataggccagacacggtggctcacgccttgtaatcccaccactttgggatgccgaggcgggtggatcacaagttcaagagattgagaccatcctggcctacatggtgaaaccttgttctctactaaagatacaaaaattagctggacgtgatggcgcgcgcctgtagtcccagctactcaggaggctgagaatcgcttgaacccaggagtcagaggtggcagtgagccaagatcatgccactgcactccagcctggtgacaaagtgagactccgcctcaaaaaaaaaaaaaaaaaaaaaagaaatatggtataaagataaatggtatacctgcatagggcacttaccacgaatggaacttacaagactagaagtggctctgagtgagtagtgagtgaaagtgaaggcctaggacatgactgcatacttttatataactggcagcacagtaggtttgtttacacagcatcactacagatgcatgagtgatgccttgtgcgacaaacttacgacagctatgatgtcagtaggtgacaggaaattttgagcttcattatcatcttaacagaccatcattgtatgtgcgccctattgttgaccaaaatgttagtggtgcatgagtgtgcattatttgctttattcttctctgtaaattggtgacaacaatacctgcctcattaggttactgtgaagagttagtgaagagcacaaaacagagcctgttagggagcaaaaactcataaatgttagttatgatcattgttaaaattgtgtcattctgatttcttataaacctgagaccaatgggaaccagattgctagattctttttcttttttttttttttttttttttttttttttgagacaaagtctcaccctgttgcccaggccagagtgcagtatgatcacagctcaccttagcctcgacctcctgagctccagtgatcgccccatatcagtgttctgagtaactgggaccacaggcgtgtgccaccatgctctgctgattattttttatttttatttttattttttgggagatggggtctcactgctttgcacaggctggttgcaaactcctgggctcaagaaatcctcccatttaggcctcccaatgtgctgggattacaggcgtgagctaccatgtgtccatgtgtagcctagattctctctctttttttttttttgagatggagtcttgctcttttggccgggctggagtgcagtggtgcggtctcaggtcactgcaagctccgcctcccgggttcatgccattctcctgcctcagcctcctgagtagctgggactacaggcgcctgccaccacacccggctaattttgtatttttagtagagacggtttcaccgtgttagccaggatggtctcgatctcctgacctcgtgatccgcccgcctcggcctcccaaagtgctgggattacaggcttgagcctctgcgtccggcctagattctgttttttttagagagccttgatattagaatcctaaaggttactcattgtttcttcctaaagacctacagccttttatttattaagagacggtgtctcactcttgcccaggctggagtacaatggcaccacagcctacaactcctgggctcaggcagtcttctgtggtcttcctgtctcagcctcccaagtagcttttttttgagacagagtcttgctctgtcgcccaggctggagtgcagtggcgtgatctcagctcactacaagctccgcctcccgggttcatgccattctcctgcctcagcctcccgagtagctgggactacaggcacccgccaccacgccgagctgatttttttgtatttttagtagagacggggtttcaccgtgttagctaggatggtctcgatctcctgaccttgtgatccacccgcctcagcctcccaaagtgctgggattaagggcgtgagccaccacaccctgccccaagtagctttttttgtagacttggggctcttggtatgttaaccaggctggtctgagactcctggcctcaaacgttcctcctcaagctttcattctggagtggtttcctcagtataggggtccatgacctttggtaacttttaagcagtttttaagagtttactgacaattctaccagaaaacccaagaaatttttttgaggagaccttgaatcactcattgccacagttgtagttttgtcattgttctccttttcctcttggaaactatttttctttcctcagacaagtatcttgtcacctcttcacctgtcttgaaatgatgcgatgttgtttatactacagtttggaagtctactacacattttggtggagatggatggggaggatagaatagtgggtaaatgtaggccttgttgtcagattgtttggattctagtcctggtccctttgctatgcgacctgacttctctgagccttagtaaaatgggagcaaaaaatggtacctccttgggtaggtgcagtggctcacgtctgtaatcccagcatgttagtaggccgaggcaggaggattgcttgagtccagaagcaagaccagcctgggcaacccagggagaccctgtctctctttattaaaaaaattaaaaaactgtactttcacataggattgccgtgagcattaaatgagataacctaggcatagtgcttggcccgtggtaattatttataaatgttagctgttcttattttgtggaacagtcattgtaggatggatacttgatataaataataataaattggagatattgagaactaacaatgccttagggctaaggcctagaaaaatattaaacttagctttttaaaaaatttttaatttttgtgggtacatggtaggtgtatatatttataggatccatgagatattttggtataggcatgcaatgcgtaataattacatcagcatagatgggttatctatcaccttaagcactaatcctttgtattataagcaatctgattatactcctttagttattttaaaatgtactgttattattgactatagtcaccctgatctgctctaaagtattagatcttattcattctttctattttttgtactcattaaccatccccactgccccatcactacccccttacccttcacagcctctggtaaccatccttttctgtgtccatgagttcaattgctttactttttatctcccagaaataagaacattcaaagtttgtctttctgtgcctggcttatttcacttaacatagtgaaacaacattgcatagtgaatgcaacaacatttatgttgttaccaatgacaggatctcctttttttttgagcctgagtcttgctcttgttgcccaggttagactgcaatggcgcgatctcggctcactgcaacctctgccttctggattcaagcagttctcctgcagcctcccaagtagctaggattacaggcatgcaccaccacgcccgactaattttgtatttttagtagcgacacagtttcaccatgttgaccaggctagtctcgaactctggacctcaggtgatccacctgcctcaggatctcattttttatggctgaatagtactccattgtactacactttctttatccattcttcttttgatggacacttaggtcgcttccaaatcttggctgttgtgaatagggctgcaataaacatgggagtgcagatatctctgatatacagatttcctttctttggggtgtatacctagcagtgggattgctggatcatacagtagttttctttttagtattttcaggaacctccaaccattttaactgaggtgagatgatatctcagattatgttagagttttttcctgtagagttgtttgggttccttatatattctggttcttaatcccttgtcagatggatagtttccagatattttctcttctctttgtcgatcatttcctttgttgtgcagaagctttttaacttgatgtgatcctatttgtccgtttttgctttggttgcctatgcttctggagtattacttaagaaatctttgccaagctcaatgtgctggagaatttcccggtatgattttgtggttccacatacattttaggattgttttgtctatttctgtgaagaatgtcattggtattttgatagggattgcattgaatctgtagattgctttgggtagtctgggcattttaacaatatttaaacttactgtagcaatctatagagtgagaccctgtctacaaaaaaaaatagttacttttgaagattgtgcagttttgtaattggttgcatttatcgtcaactctccttcaagcagcctttagacactgattttcacatctaagaagccaccaaatggttgatgttgttagtaatgcatctgttaccaacactcatctgtgagtcacatcatgcatttccaagttgatctgaaggtatattaggtgcttgccccaggaaccaaaatttctatttgtggctctgctcaaaaccagtgttgtctccacggtgtgaacctgtatatcttcgaactatacagacacttgtctaaacatgttcttttctttaaatactgctaggtgttccacaacagtgaagatttggttattggagactgttcttttctgataaaagtgttatagctggccgggtgcggtggctcacgcctgtaatcccagcactttgggaggccaagggggcggatcatgaggtcaggagttcgagaccagccacaccaacatggtgaaaccccgtctctactaaaaatacaaaaattagccaggcttggtggtgggcgcctgtagtcccagctactcaggtgactgaggcaggagaatcacttgaacccggttggcggaggttgcagtgagccgagatcacaccactgcactccagcttaggcgacagagcgagactccatctcaaaaacaaaagaaaacaaaaaagtgttaaagctgtaaatttgtctctgagcatggctttagctgcatcgtatacattttgatatattgtgtttttactttcatgcagttcaaaataattttaaattttctggccgggcgcgctggctcatgcctgtaatcccagcactttgggaggccgagacgggtggatcacctgaggtcagtagtgccagaccagcctggccaacatggcgaagcaccgtctctactaaaaatacaaaaattagctgggcgtggtggtgggcacctgtaatcccagctactcaggaggctgaggcaggagaatcacttgaactcgggaggcggaggttgcagtgagctgagattgcgccactgcactccaccctaggcgacagagtgagactccatctcaaaaaaaaaaaaaaattagctgggcgcagtggcatgtgcttgtagtcccagctacttgggaggctgaggcaggagaatctcttgaacccgggaggcggaggttgcagtgagctgagattgcgccactgcactccaccctaggcgacagagtgagactccatctcaaaaaaaaaaaaattagctgggcgcagtggcatgtgcttgtagtcccagctacttgggaggctgaggcaggagaatctcttgaacccgggaggcggaggttgcagtgagccgagatggcgccactgcactccagcctgggtgacagagcaagaccctgtctccaaaaaaaaaaagaaaaatgttttcctcgtgatttcttcttgggttttttataagtgtattgtttaattttcaaaaatttcaggttttcccacatttctttctgttgtggacctctaacttagctccattgtggttaaggaacatactttatgggatttcaacctttttccatgtactgagacttgttttgtggcccaacatatgatctctcctagagaatgttctatgtgcttgagaagaatgtgtatcatgggttattttacgttctttttttcccccataatataagaattttttgcatattgtaaatatatgtgtacattgttattattgcagaacacattttctttttttggagatggagtcttggtctgtcgtcccaggctggagtgcagtggcacgatcttgcctcactgcaacctctgcctcctgggttcaagcaattctcctgcctcagcctccatagtaactgggactgcagatgcacaccgccacgcctggctaatatttttttgtattttagtagagatggggtttcaccgtgttgcccaggctggtctcaaactcctgagctcaggcaatccgcccgcctcagcctcccaaagtgctaggattacaggcatgagccactgcacccggcctgcagaacacattttcaagaggtcctgttgctgcttaagctgttggtataagtgctctggagtaatatgtcatgatggaaaagtacatgagctttgaaacagggatacttgagtttgaatatggatttttattgtgtgtccttgggcaagtcatgtaacttctctgagccctcacttatagaaggtcaataataaggttcttgagtggcaagcaataaaaactgaccttgagctgggggctgtggctcacacctgtaatcccagcactttgggaggccgaggcgggcggatcacctgaggtcaggagtttgagaccagcctgaccaatatggagaaagcctgtctctactaaaaaatacaaaattagcctggtgtggtggtgggtgcctgtaatcccagctactcgggaggctgaggcaggagaatcacttgaacccgggaggtggaggttgcagtgtggagatcgtgccattgcactccagcctgggcaacaagagcgaaactccatctttaaaaaaaaaaaacaaaaaacaaaaaaaaacaaacaaaaaaggctgaccttgactaatttcagcgtatgagtcaaataattagttctaggaatctacgtagcaggaactaatgacagtgtctttagggtgccattatgagaagaaagtatcctctggaatcacatcctttcatggccactgctcagagaccccgactctcagatgagaacgtcctatggccttctccagggtcagatatgcccaccacttggccagaagaaggcacagcaacttgagtttgactaacattctcccaaaactgtagtcggggaagggtaattcccaaagaaaaattggggtgtttttttgttttgttttgttaagtaacccttattttgatggggctttattctttcttcttttttttttttttttgagatagagtctcgctctgtcgctaggctggagtgcggtggcacgatcttggctcactgcaacctccaactccctggttcaagcgattctcctgcctcagcctcccgagtagctgggattatagactgtgcgtgcgccaccatgcctggctaatttttgtatttttagtagggatggggtttcaccatgttggccaagctggtctcgagctcctgacctaggattacaggcctaagccaccgcacccggcatgatgggtctttattcttcaaagcaggaggaagggatcctagaaaaacagagacaaggccaaacatggtagctcacacctgtaatcccagcactttgggaggccagtgcgggtgaatcacgaggtcaggagttcaagaccagcctggccaacatggtgaaacaccgtctctactaaaataaaaagaaattagctgggtgtcgtggcaggtgcctgtaatcccagccacttgggaagctgaggcaggagaatcgcttgaacccgggaggtggaggttgcagtgagccgagatcacgcgactgcactccagcccaaccaatagtgtgagactctgtctcgaaaaaaaaaaagcagagacaagacaactagtacagtacttacagggttattatgatgattaaatgagagaatagctgtgaggtgattgatatagtgctgtgcttaatacaaactatcattttattatacgggttgagtgtttctaatctgaaaatccaaaattagaaatgctctacagtctgaaacttttttgagcaccgacctaatgttcaaaggaagtgcttattggagcattatgggttgttagatttttgggttgggaatattcaaccagtaagtactataaaatgcaaatattccaaaaaaaatctgaaatctgaaacatttctggtcctaagcaagcattttgcaaagggatacgcaacctgtagtacgttctttatcattgttttaagtagttaatatattgtggtacagattctgaggtggtatagcaaattcgattgtattattaaaaagcatatttatattttgagagcttgcttaggattattggagagaataaaacagtgaagctttggtgttatgagggaattttagatagaaaagtgcagtttttcagttcatgctctttcattttttactccctcaggttaaagctgaagctcaacaaagatatagtgatctctgtgggcatttataatctggtccagaaggctctcaagcctcctccaataaagctctatcgggaaacaaatgaaccagtgaaaaccaagacccggacctttaatacaagtacaggcggtttgcttctgcctagcgataccaagaggtctcaggtaggtagagatgccttttgttgttgttgtttttgagacagggtctcattgtgtcgcccaggctggagtgcagtggggcgaacatgactcgctacagccttgacctcctggactcaagcgatccttctgtctcagcctcccaagtagctgggatcacaggcatgtgacatcacacccagctaatttatttatttatttattttttaagagactggatcgactgggcacagtggctcatgcctgtaatcccagcactttgggaggccgaggcaggtggattaccgaggtcaggagttcaagaccagcctgaccaacatggagaaaccccatctctactaaaaatacaaaatgagctgggcatggtggtgcatgcctgtaatcccagctactcaggaggctgaggcaggagaatcacttgaacccgggaggcagaggttgcggtgagccgagatcacgccattgcgctccagcctgggcaacaaaagcgtaactccgtctcaaaaaaaaaaaaaaaagagacggtgtctcgctatgttgcctgggctggtgtcaaactcctggtcttaagtaatcctcctgctttggcttcccgaagtgctggggtgctgggattacagacattggccactgtgcccagcgtttttttgtttcgttttgttttgttttgtttaatagagatgaggtctcactatgttgctcaggctggcctcgaactcctaggctcaagcagtactcctgcttcagcctcctaaagtgctgggattataggtgtgaaccaccacacctaacccaagatgctttcttactgaattttctccaactgaagagttaactaggaggagagacattgatcaggctgaccagttaaataactttcatatgtgcatctttcctttccttctccttccctttccttttcttttttctctctccgactccctcccctcccctcccctcccctcccctcccctcccctcctctcccctcctctcttctgtttcttttctttccgctagtcaagtgaagcagtgggaatggaaaaggaacaaagaaatctgtaactggttgtgatcaattagttgtaaacaccaccgcacttggacgagccatgtgcacctttcttgctaacctgttaaaccacaaagacttaactctttgggactgtggtatctggatcagtgatattttgatagctagaaagttaaactgggccagtgtctgaaagagatgtcagtgaaaacctcaccccttcatcactcagtacatgctgctgtcagtctaacagtcttgctcaggtacaatagcagaaaatactttatagttaattagggagataaggagttaggaaaagtatgaagtgtgaagtgaactcattttttttagggagagaatttatttttgctagtgatatttttcctgtgccttgggatgacatacatctccctttctgcatctgaaagacagatgcaggacgcagaacattgtcttttctcatcctcttacctttgctcagtctatagagggatttaacatcaaaaattaaaattgaatgagtcatgcttcctgtatgcaaaatgtggaagaatctgagattttacataagtttagggcctataaggatgactaaaatattattttgattcaagccagagagttttgccctactctttgaaggagaaaaagataaggaattttcttttccattttggaagtaactaattttttatattgatttattcataggcagtaagctctctggtcactgagtttctttcttggtccagtatgtttgaaaaaaccttgagagttcttttgttcataaaacccaaatttgaatctgctactaagctgttattagtcacatatccaggataaaatacaaacatcattgggtatggtggctcatgcacttttggaggctgaaacaggaggatcacttgaacccaggagtttgagatcagcctgggcatcatagcgagaccctgtctctactaaaaaactaaaaattagccaggcgtggtggtgcacagcctggggaagagagtacaaaaaaaaaaaaaatatatatatatatatatatatatgtatgtatgtgtgtgtgtatatatatatctctctccaaacaatacaaataatctttgcagtagcgccatcatggttgactgtagcttcaacctcttgggttcagttgatcctcccacctcagccacctgggtagctgggactacaggctcatgccaccacgcctggctaattttttgtatttttttttttttcatagagacaggatctcactatgttacccaggctggtctcgaattcctgggctcaaacgatccagctgccttggcctcacaaagtattgggattacaggcatgagtcaacgtgccctgccttggaagtagtacttatatgtgtgtgtctctgccttccacattgagacctagcacagtacctgacataggtcctctcatttaataaatagatgtggtggccgggtgcggtggctcacgcctgtaatcccagcactttgggaggctgaggcgggcggatcacgaggtcaggagatcgagaccatcccggctaacacagtgaaaccccatctctactaaaaatacaaaaaaattagccaggtgtggtggcgggcacctatagtcccagctactcgtggggctgaggcaggagaatggcgtgaaccccggtgggtggagcctgcagtgagccgagatcgctgcctgggtgacagcgagactgtctcaaaaaaaaaaaaataataaataaataaataaatagatatggtttgggctgggcacagtggctcacacctgtaatcccagctagtcaggaggctgatgcaggagaatcacttgaacctgggaggttgccgtgagtcgagattgcgccactgcacgccagtgacagtgtgacagactgcatctcaaataataaataataataaatagatatggtttaagcatgctttgtgtgtcagggatggtgctgacaggtcagtacatttttttttttctttttttgggttggggggatagagttgctctggtacccaggttgcagtgcagtggcgccatcttggcacactgcatcctcgaactcctgggctcaagcgatcctccagtctcagcctcccaagtagctgggaccacaggtgtgtaccactataccgagctaatttttaatttttttatacagatagggtcttgccatgttgtccaggctggtcttgaactcctgggctcaagcagtcttgcctcagctctcaaagtgctgggattacaggcatgaggcactgcacctagcctattttattgtttttgcaaagaggatctcactgtgttgcccaggttggagtgcagtggctattcataagcacagtcccactctaaaacagtttgaacatctacctcttgggattgttacagaagataaagtagttggtgtaaagtacctgcagtcactcaataaatgttaattccctgttggagaaggaggatgccccaggtgagccatcttcctgctccttagaagagagctgattttaacttgctagtgtcatcatcttcgagttattttgcatctcctcgtagccttcccatttgatccttgtcgttcttctccttcagatctatgggagtcgtcagattatactggagaaagaggaaacagaagagctaaaacggtttgatgatccaggtttgatgctcatgggtttcaagccgttggtactgctgaagaaacaccattacctgaggccctccctgttcgtgtacccagaggagtcgctggtgattggtaagtagcgtggaccatggatgagtgactctaacacacagtgcagtttacggagcagcgctttgtaaatgggcactgcttggacactgtacaggaaatgttaatggagtatgttgaaagtgtttcaagctctgcctggtgcagtggctcacacctgtaatcctagcactttgggaggctgaggcggatgggtcacctgaggtcaggacgagcctggccaacatggtgaaacctcgtctctactaaaaatacaaaatttagccaggcctggtggcttgcgcctgtgatcccagctacctgggaggctgacgcatgaaaatcgcttgaacctgggagacagaggttgcagtgagctgagatcacaccactgcactccagcctgggccatagagtgagactctgtctcaaaaaaaccaaaagtgtttcaagctcaaattttggaaatgtgggaatgaagaaagttaaacagattttttttttttttttttttttttttttttttttttttttttttttggagatggagttttactcttgtcacccaggctggagtgcagtggtgcagtttcagctcactgcaacatctgcctcccgggtgaggactgtggaatttagctttatatatatatatttttttaatttaattttttttttgagacagtgtctcaccctgtcacccaggctggagtgtaatggtgcaatctcggctcactgcaacctccacctccctggttcaaacgattctccttcctcagcctctggagtagctgggattacaggcacctgctaccacgtctagctaatttttgtatttttagtagagacgaggtttcaccattttggccagtctggtctcgaactcctgacctcgtgagccactgcacctggccttatttatatttatatttttattcatttttttgttgttgtcgcctaggctggagtgaagtggcgcaatctcggctcactgcaatctccgtcccctgggttcaagcgagtctcctgcctgagcctcccaagtagctgggattacaggtgcacgccaccacgcccggctaaattctgtatttttagtagagatggggtttcaccatgttggccaggcttgtctcgaactcctgaccttaggtgattcacccgcctcggcctcccaaagtgctgagattacaggcgtgagccaccacgtccagcctggaatttagctttttaaaaacaatttcccatgtaattctttgaagcatcagatagcaaaaagcaaacaaaaccaaaataagtccacagctttttctccagtgttggaaattaaagaggatgtgaaccttgccgttgtgtttatttgtgcagtctagaccctatcttttgtgctatggctcatgaacaccccagatttgactcgattggttttcattagtaactggggtcatgtcattaacctagtgtcagtaaaagtgaactgacattaataatttgctttttttttttttttctggagacagtgtctcactctgtcacccaggctagagtccagtggcaccatcttggctcactgcagtctcaagctcccaggctcaggtgatttcccacctcaccctctcgagcaactgggactacaggtccacaccaccacgtccagctaatcttttgtaatgttagtagagacagggttttgctatgttgggcaggctggtctcaaactcctgggcttaagcaatctacctgtcttggcctcccagagtgctaggactgtaagcgtgagccacctcacctggccaataattcactttctgtttgtttgttttgaaacagagtctcactctgtcgcccaggctggaatgcagtggcaatgtctctgctctctgcaagctccgcctcctgaattcaagcgattcttctgcctcagcctcccaagtagctgggactacaggcgtgcactaccatgcccagctaatttttgtatttttagtagagacggggttttaccatactggccaggttggtctcgaactcctgaccttgtgatccacccgcctgtgcctcccaaagtgctgggattacaggcgtgagccaccatgcccggccataattcactttcttaagtggaatgtttggggcttctaaacctcttattcctttttaaattttcctttctgtgtctctgctgtccccattttcccctcagctgtggggtcctccaacccttacctgttgagatattataagccctttaaaggcttggtgtggtggctcatgcctgtaatcccaacactttgggaggctgaggctggaggatcacttgagcctaggagttggagaccagcgtgggtgacttagagatactttgtctctacaaaaaatcttaaaactagctgggtgtggtggtgtgtgactgtagtcccagctattcaggaagcagaagtgggaagattgcttgagcttgggaggtcaaggctgcagtgagttctgattgcagcactgcactctatcctgggtgacagagcgagaccccgtctcaaataaataaataataaaattaaaataagccctttaaagaaaatggaagagaaactttagggctaaaagagaagaaaggaggaaacctttttaggaggctagtcactgggctttttgttttctagggagctcaaccctgttcagtgctctgctcatcaagtgtctggagaaggaggttgcagcattgtgcagatacacaccccgcaggaacatccctccttattttgtggctttggtgccacaggaagaagagttggatgaccagaaaattcaggtgactcctccaggtatgtggcagagatatttccagggcttctgaaccttgcccatactttggaatcatccatggactcctaatgcagacctactgaatcatagtctctgggaatggggcttaaaaatgtctatttttaagctttcttgggtgaatttagtgcacagccaggtaaggccactaaatatggtgatggggtgcacagcatgcgcagccgtacaaggctgatctgcagctaggatagagaaatgtctgcctaggggactgtttgcagattactgacacaagttcttgggacctcactgccgacacctttctttccaaagccattgtttggcacccttgtaatgtctaatgtttggtttagttcctatacaaaccaaccatggggtttgccaagatagtgaggtatagcggaaagaccatggattttaaagtcagatttgactttatcttgtgcttatgtgtctggaagcttgcttgcttttgttttgggcccatctctgctgcttgttagctggtcaacgtgggcaagtaatttaacctttctgtttaatattccttagctacaaagatgggcgttctggagcacctttccctcggggtggttttacatttgagatgagttactgtagttttaactttgatcctcagcatgctcaggagtgctcagttactaagctattgtatctcagctccaaattcacccttttatgctctgcactactgaggctgaaatgatccaaacctaatttcatctttcacagctggctctcaggctgtgtctatagtgggtgctagagggagaccaaagggcagaggagaggtgagggatttgcttcttcctgtttgctcagtgtggtcagcattgtcagcaaaggctttcacctggtagcagcagttagttacagggcgtagattttttagtccttccagaaccagccagtaactgaactaaaatcagcctgataactcttacctgtttccttttatttatcacgtggtagagggtaaggaaaaaaggggcgagggtgaagctcagagaaggcccccatggagctgggacttagccctccagggaggaggcactgtccggctagctctggatgtatcaaaaaagctggagactggaaccaactgccgccaggtaaagggtctttgctggggcaatacaggtaggaacagtaaatacaggagggccgcaaccacagttttgctttctgcagtttcagttacccatagtcaaccatggtccaaaaattttaagtggaaaattctagaaataacttaaaagcacaatcccacctggggcaggaatcatctgtttgttcagcatctccacactgtaaatgctacccaccagttagtcacttagtagctgtcttggttatcagattgactgtcaaggtaatcagtattgcggtgcttgtgttcaggtcacccttatttaataacggccccaaagcacaagtgtagtggtgctggcagtttggatatactaaagagaaagtcataaagtgcttcctttaaatgaaaaggtgagagttcttgactttaaggaggaaaaaaatatatgctaaggttgctaagatatatggtaagaaggaatcttcgaaccacaaaattgttaagggaaaaaattcattttagtttttttttttttttatgctgaggttgctaagatacatggtaagaaggaatcttctatccacaaaattgttaagaaggaaaaagaaattcatcttagtggccaggcgtggtggctcacgcctgtaatcccagcactttgggatgccaaggtggcggatcacgatgtcaggagattgagaccatcctggctaacacggtgaaaccgtctctactaaaaatacaaaattagccaggtgtggtggcaggctcctgtagtcccagctacttgggaggctgaggcaggagaatggtgtgaacccgggaggtggagttagtgagctgagattgcgccactgcactccagcctgggtgacagagcgagactctgtctcaaaaaaaaaaaaaatagttttttcccccccttctttttttacataaattgagacaaggtctcactatgttgcccaggctggtctcgaactcctgagctcaagtgatcctcctgcttcagcctcccaaagtgctgtgcttaccgacgtgagccaccatgtccggcccaagctagttttcctgttgcacctcaaactgtaaaagttactgccacagtacatgagaagtgcttagttaaaatagaaaaggaggccaggcactgtggctaatgcctgtaatcttagcactttgggaggctgtggcaggtggatcgcctgagcccaggagttttgagaccagcctgagcaacatggtgaaactctgtctctgcaaaaaaataaaaaaaagtagccaagtgtggtggcattcacttgtagtcccagctacttgataggctacttgagccggagaggtagaggctacagtaagctgtgatcacaccactgcattccagcctgggtgatagcaagatcctgtctcaaaaaaaaaaaaaaaaaaagatgaaggctgggcgcggtacctcacgtctgtaatcccagcactttgggaagccgaggtgggcagatcccctgaggtcaggagtttgagaccagcctggccaacatggcgaaaccccatctttaccaaaagtacaaaaattagccgggcgtggtggcgcctgtaatcccagctattcaggaggctgaggcaggagaaccgcttgaacctgggaggcggaggttgcagcgagccgagattgcccactgtactccagcctgggcgacaagagtgaaactccatctcaaaaaaaaaaaaagatggaaaaaaacattaaatattaaatttatgaacgtatgacatggacaaacatgtttcaattgacggcagtcaggtttggtgctgtccgaggtttcaggtatcctcccgggttcttcaaacatattccccagggataagggatctactgtatacaggaaggggcacccctcctcccttgcagtcttctggaaactgcagagggagtctgttaggcagatgataacaaaaaccagctggtggagttcaagaaatggggcctacggggccccagccccagcaccacaggacataaaaggaagaatttggagctgagaaacaagtgactgcaacacttgaagtcaaatcaaagaaaatttatctcctttcttcaggcttccagctggtctttttaccctttgctgatgataaaaggaagatgccctttactgaaaaaatcatggcaactccagagcaggtgggcaagatgaaggctatcgttgagaagcttcgcttcacatacaggtgagtcaatctcaggctttctggaactgcctcctgagttgaaaatcttattagaaacagcttgggcataggccaagagaatggcactactcttttcagcaaactgacagattactacttgttattaatagttttttgaaagccatatagagaatggaaccttttattatgttggagactctgggattttgtggtttctctgttgtgctgtacttagccagattagttggttgaacaaatttgaaaaaatagcaggattcttattcgcccttctccttgattgtgtttgttattccacaatgagcaaaagtaaataaatctagtgtaaattgttaaaggcttaaaagaatgattaagtaattcaagtcattccctctcacatatataatagaccaactctcagagcctgcataatgggacactaaacgtaatttttttcacatgtcatttttaaaaatttattattattattattattattattattattattattattttgagacagggtctcttgtcacccaggtttgattgcagtggtgttactgtagttcactgcagccttgacctccctgggctcaggtgattctcccacctcagactcctgagtagctgggaccatacccttgcaccaccacacctggctaatttttgtattttttgtagggacggagtttcaccatgttgcccaggctggtctggaactcctgagctcaagccatccgcctgcctcagcttctcaaagtgctggattacaggcatgagccagggtgcccaggctggtttgctttctaagttgacttgagacaaagtcttgctctgccatccaggctggagtaccgtggcacgatcatggctcactgcagcctcgatctcctggactcaagcagtcttcctgcctatgcctcctgagtagctgggaccacaggcgtgcaccaacatgcctggctgatttttaaattttttgtagagacagggtctcaccatgttgtccaagctggtcttgaactgctagactcaagcattccgcctaccttggcctaccaaagtgctgggattacaggcatgggctactgcacctgacctcaactgttttacttggggtgtttttctcagctcaccccggacctgtagtatctcaggtggttttattctaattttttcaatgtttaaattgtcatgtttcagttgagttacattattgttttaacagaagtgacagctttgagaaccccgtgctgcagcagcacttcaggaacctggaggccttggccttggatttgatggagccggaacaagcagtggacctgacatgtaaggaggttgaatagagtagttcttttcatgggaggctttcttactggttccactctgcaccagtaatttgggtgcatttcccagtcctctctaaacacttaacctcattccccagaccccctctgtttggaagcttttccagaccagcttaaacagccagggaacagatttggctggttccatagtgagaggaggagagtgtcaggcttctgagacctgcctctgcactaggccgccctgtgactacatgctggtgaaatttaaaaaataatataagaggctgggcacggtggctcatgcctgtaatcccagcactttgggaggccgaggcgggtggatcacgaggtcaagagattgagaccatcctggccaacatgtctctactctgtctctactaaactctgtctctactaaaaatacaaaaaattagctgggtgtggtggcgtgtgcctgtagtcccagctactcgggaggctgaggcaggaagatcggttgaactcaggaggcagaggctgcaatgagccgagattgcaccactgcactccagcctggtgacagagcgagacgctgtctcaaaaaacaaaacaaaaacaaaaaatcaataaataatttaagaggaaataagtggtggatttgggtttagaatccagcgactcgcagccgggcgtagtggcttacgtctgcctcctaggttcaagctattctcgtgtctcagactcccgagcagttggtccccgcccggctaatttttgtatttttagtagagacgggatttcgccatgatggcccggctggtctcagaatgatctattttagacaaaatagccccagtgttaaaagcagaagagttattggaccattgttactgtggtgcctgcttagctgtgtctggcgaaagagaaacgttttgagctaaacagcccatctcctcctttcaggccttaggcaaattcagaagtcggtggcctagtgcctagcaaggtagtttaggacacaggtgcctgccaccaagcccggttaatttttttgtatttttagtagagacggggtttcactgggttaggatggtctcgatctcctgaccttgtgatccgcccgccttggcctcccaaagtgctgggattacaagcaggaggcgctgcgcacggcctattttgtgtttttattagtgattgggtttcaccatgttggccaggctggtgtcaaattcctgacctcaagtgatccacctgtctcggcctcccaaagttctgggattataggcataagccaccatgctcactacttttatttttatttttagtactgagcataggctggacctcagtacattcattcattcatttgagacaggttctcactcttgtcacccagactgaagtgcagtggtgggatctcggctcactgaaacctttggctcccaggctcaagcagttctcctgcctcagccttccgagtagctgggattacaggcacccgccaccatgcctggctgatttttgtattttttggtagagatgggggttcaccatattggccaggctcatcttgaactcctgaccttaggtgatccacccgcctcggcctcccaaagtgctgggattacaggcaagagccactgcacccagcttctctgtacttttaaaactctacagatgattcccagattgggagccagtgctcttgcagaggttcccatgatgtggaccaggggacttctgatgcagcaggagcacagtttggctccagcattgtgccatctaggtacaccagcaagagctcccctccatgcttggcaaatacgggcatgtgagctgcccatctcatcacccttgcccttgatgtgacacagctcatgtcagaagcttgatttaacaatatagttgtaagctaacaaaaaaggaaacaaaagtatgatctttcctccaaagttgccttttcctgtcatacttgctccccctgtttcagccagtcatctccccatcccactcctattcttcttacattctggtttccagctctgtgatttcagttaaataataaatcctattctatcagtaagtcctgccagttctgtcacttctcatgtttatgggtcctcccacccacaccccacttcacctgtcttatcttaccctctttcagttcaccctccatgcagctatcaggggattctttggataaggcctaattccttggcaggcatcccagcttccatgacctcatcatacccatctttctcacctctctgctggccctgtcctccttaacaccctaccttccagctatatgtcacctgctatttctctcccagtgccttctgcttcttatctttcaccacccctcctgtgttccagtgtgcctgtacagtcgcttcttgcatggtgttgcccaactccactgcatcgtttttatccacctcctctctctcactgggctgtaagctcaccgcaggcatgagcacttgtttgaattcccagaatctagcttagtatctccactgtaccactgccctttgggaaagtcatgtaatctctctccttttctcctctgtaaaactggggacaaatcaagaggctgaggcaggagaatcgcttgaaccagggagtcggaggttgcagtgagccaagatcgcgccactgcactccagcctggcaacagagcaagactccatctcaaaaaaaaatctaaaaaaaaaaaaactggggacaaatttacctatcctataggttgttagaaggagtaaatagagtaagtttaaagcatttacaacagtgcctggcggtagtatgtgtaattacagtaaatgcaggtgttggaaggtacttggtaaatgctggaaagacatttccctagacccctcccaccttagcagttaggtgctctctcttctggttctcagagagttctggaagtggacagcaagctggggctcgtgactcaccaggccactcttctgtgttttgattttctagtgcccaaggttgaagcaatgaataaaagactgggctccttggtggatgagtttaaggagcttgtttacccaccagattacaatcctgaagggaaagttaccaagagaaaacacggtgagaagctgaatgtggacatgtgggctatttttaaaaattgcttttatgatagtcttatcacagtgggcaatatcctttcagaaatatctattcacagtctagttaaaatggcttttatccaaaaaacagacaataacaaatgctggcaaagatgtggagaaaagggaaccctcatacactgttggtgggaatgtaaattagtacagccactattatggagaatagttgggagtttcctcaaaaagtgaaaactagagctaccatatgatccagcataccatatgatccagtcagtatatacccaaaagaaaggagatcaatatatcaaagagatatgtgcactcccatgtttattgcagcaccattcacaatagccaagatctggaagcaacttgtgtccatcaacagatgcctggtaaagaaaatgtggtacacgtacacaatggagtactattcggccataaaaaagaatgagatcctgtcatttgcaataatatgttaagtgaagtaagccaggctcagaaagacagacatttacatgttctcacttatttgtggaatctaaaaatcaaaacaattgaactcatggagagagagcatagaaggatggttaccagaggctgagaagggtagtgaggcattgtggggttggtggggatggttaatgggtacaaaaaaaaaatagaatgattaagatctattcgataatacaacagagtgactatagtctaatttaattgtacatttaaaaataactaaaggaatacaattggaatgtttgtaacacaaaagataaatgcttgaggggatggataccccatttatgctgatgtgattatttcacattgcatgcctgtatcaaaatacctcaggtaccccacaaatatatatacctagtatgtacccacaaaaattaaaaatgaaaaaattttagaaaagaactgtctatacaaccatacatatttacacataccaacatacatatttcagcacaaatggaataatacattgttttctagtttgctatttttgttactcagctatatatgttggacagttatttatatccacacttacctatctcattttttaaaaaatgaggctgcagagtagttcattggatagatataccaggttatttaaccagacctgtattgacaggtggatatgctgcagtgaacatgcatttccatcgtgttcttgtgtgaatagatccacaggatgcattcttgcagtgaattgcttccaaaacagtgatttaccctctatccaagaaggagtgaatgttttcctgcactctcacccttccaggacttaatttttttaatttctatttaaaatgatacagaagttggccaggtgcggtggctcacacctgtaatcccagcactttgggagcctgaggtgggcggatcatgaggtcaggagttcaagaccagcctggccaacacagtgaaacctcgtctgtactaaaaatacaaaaattagccagatgtggtagtgggcgcctgtagtcccaactacctgggagactgaggtaggagaatcccttgaacccgggaggcagaggttgcagtgagccgagaccacaccattgcactccagcctcggtgatagagtgagactccatctcaaaaatgatacagaagttatatcctttttttgtttttagacagtcttgctctgtcacccaggctggagtccagtggctcaatcacagttcactggctcactgtagcctcaacctcctgggctcgagtgatcctgcagcctcagcctgctgagtagctgagactgcaggtgcacaccaccatggccggttgattttattactttagagccagggtctcactgtattaccaaggctggtcatgaacctgtaaaagattttcaaaggaaggaaggaatgacttacccagagtgagcaacagttttgggtaaactgatggcattcacactacttgtaatttcctcctaggtgtgatctgtgttttattttgcactttaaatgaagctaccttatcgagataagtcttccccatggtgtcctaggctggcatcacagctttatggttaattgcagcccagattatacgaggtcccccatgccatgtagctgggatgccacttgtatgtagcatttccagtcactctctcctgacctttccccccagataatgaaggttctggaagcaaaaggcccaaggtggagtattcagaagaggagctgaagacccacatcagcaagggtacgctgggcaagttcactgtgcccatgctgaaagaggcctgccgggcttacgggctgaagagtggtctgaagaagcaggagctgctggaagccctcaccaagcacttccaggactgaccagaggccgcgcgtccagctgcccttccgcagtgtggccaggctgcctggccttgtcctcagccagttaaaatgtgtttctcctgagctaggaagagtctacccgacataagtcgagggactttatgtttttgaggctttctgttgccatggtgatggtgtagccctcccactttgctgttccttactttactgcctgaataaagagccctaagtttgtactatatactg

SEQ ID NO: 170 - DNA, 2764 bp, Homo sapiens
gattgtcgtcttctgtccaagttggtcgcttccctgcgccaaaggtaagcgggccgttatccatttgtgttgttcgccagctaggcctggcctcgtcccgcttcgctcggtcggtctcgcgcgcccccatagccttgctagagggttagcgttagccttaagtgtgcgaatccgaggagcagcgacagactcgagaccacgctccttcctcgggaaggaggcggcacctcgcgtttgaggcccgcctgcgtttgaggcccgcctgcgcttgcggcccgcctgcgcttgaggcctgtctgcgtttgagatctcattgggcgtgattgaggaatttggggaggtttttgggcggtattgaggacgagggggtccgttagtcagcatagaatcctggagcgggaatccctcaccgtctaaatggcgtcgggggcgggacctccgggatctggcttccgcgggccgccgccggccctgaaacgtgagggatagctgagatgaggcagctactgggatggcccccatgcgcatttacatgcagtccgactgccgagctttcgaggcagcaggatttaccgtccacattcctcactactaaccaagcttttagaacagatctcacaagaacctagaggtcggtattttttcgatttaaatttgcctgttactgacgttaacgtctttcgcctagtgagcagtagccaacatgtcagggtgggagtcatattacaaaaccgagggcgatgaagaagcagaggaagaacaagaagagaaccttgaagcaagtggagactataaatattcaggaagagatagtttgatttttttggttgatgcctccaaggctatgtttgaatctcagagtgaagatgagttgacaccttttgacatgagcatccagtgtatccaaagtgtgtacatcagtaagatcataagcagtgatcgagatctcttggctgtggtgttctatggtaccgagaaagacaaaaattcagtgaattttaaaaatatttacgtcttacaggagctggataatccaggtgcaaaacgaattctagagcttgaccagtttaaggggcagcagggacaaaaacgtttccaagacatgatgggccacggatctgactactcactcagtgaagtgctgtgggtctgtgccaacctctttagtgatgtccaattcaagatgagtcataagaggatcatgctgttcaccaatgaagacaacccccatggcaatgacagtgccaaagccagccgggccaggaccaaagccggtgatctccgagatacaggcatcttccttgacttgatgcacctgaagaaacctgggggctttgacatatccttgttctacagagatatcatcagcatagcagaggatgaggacctcagggttcactttgaggaatccagcaagctagaagacctgttgcggaaggttcgcgccaaggagaccaggaagcgagcactcagcaggttaaagctgaagctcaacaaagatatagtgatctctgtgggcatttataatctggtccagaaggctctcaagcctcctccaataaagctctatcgggaaacaaatgaaccagtgaaaaccaagacccggacctttaatacaagtacaggcggtttgcttctgcctagcgataccaagaggtctcagatctatgggagtcgtcagattatactggagaaagaggaaacagaagagctaaaacggtttgatgatccaggtttgatgctcatgggtttcaagccgttggtactgctgaagaaacaccattacctgaggccctccctgttcgtgtacccagaggagtcgctggtgattgggagctcaaccctgttcagtgctctgctcatcaagtgtctggagaaggaggttgcagcattgtgcagatacacaccccgcaggaacatccctccttattttgtggctttggtgccacaggaagaagagttggatgaccagaaaattcaggtgactcctccaggcttccagctggtctttttaccctttgctgatgataaaaggaagatgccctttactgaaaaaatcatggcaactccagagcaggtgggcaagatgaaggctatcgttgagaagcttcgcttcacatacagaagtgacagctttgagaaccccgtgctgcagcagcacttcaggaacctggaggccttggccttggatttgatggagccggaacaagcagtggacctgacattgcccaaggttgaagcaatgaataaaagactgggctccttggtggatgagtttaaggagcttgtttacccaccagattacaatcctgaagggaaagttaccaagagaaaacacgataatgaaggttctggaagcaaaaggcccaaggtggagtattcagaagaggagctgaagacccacatcagcaagggtacgctgggcaagttcactgtgcccatgctgaaagaggcctgccgggcttacgggctgaagagtggtctgaagaagcaggagctgctggaagccctcaccaagcacttccaggactgaccagaggccgcgcgtccagctgcccttccgcagtgtggccaggctgcctggccttgtcctcagccagttaaaatgtgtttctcctgagctaggaagagtctacccgacataagtcgagggactttatgtttttgaggctttctgttgccatggtgatggtgtagccctcccactttgctgttccttactttactgcctgaataaagagccctaagtttgtactatatactg

SEQ ID NO: 171 - protein, 597 aa, Homo sapiens
MSGWESYYKTEGDEEAEEEQEENLEASGDYKYSGRDSLIFLVDASKAMFESQSEDELTPFDMSIQCIQSVYISKIISSDRDLLAVVFYGTEKDKNSVNFKNIYVLQELDNPGAKRILDQFKGQQGQKRFQDMMGHGSDYSLSEVLWVCANLFSDVQFKMSHKRIMLFTNEDNPHGNDSAKASRARTKAGDLRDTGIFLDLMHLKKPGGFDISLFYRDIISIAEDEDLRVHFEESSKLEDLLRKVRAKETRKRALSRLKLKLNKDIVISVGIYNLVQKALKPPPIKLYRETNEPVKTKTRTFNTSTGGLLLPSDTKRSQIYGSRQIIKEETEELKRFDDPGLMLMGFKPLVLLKKHHYLRPSLFVYPEESLVIGSSTLFSALLIKCLEKEVAALCRYTPRRNIPPYFVVPQEEELDDQKIQVTPPGFQLVFLPFADDKRKMPFTEKIMATPEQVGKMKAIVEKLRFYSDSFENPVLQQHFRNLEALDLMEPEQAVDLTLPKVEAMNKRLGSLVDEFKELVYPPDYNPEGKVTKRKHDNEGSGSKRPKVEYSEEELKTHKGTLGKFTVPMLKEACRAYGLKSGLKKQELLEALTKHFQD

SEQ ID NO: 172 - DNA, 2164 bp, Homo sapiens
agggggcgttgattgggaccgagtacagggcccgcgcatgcgtggattgtcgtcttctgtccaagttggtcgcttccctgcgccaaagtgagcagtagccaacatgtcagggtgggagtcatattacaaaaccgagggcgatgaagaagcagaggaagaacaagaagagaaccttgaagcaagtggagactataaatattcaggaagagatagtttgatttttttggttgatgcctccaaggctatgtttgaatctcagagtgaagatgagttgacaccttttgacatgagcatccagtgtatccaaagtgtgtacatcagtaagatcataagcagtgatcgagatctcttggctgtggtgttctatggtaccgagaaagacaaaaattcagtgaattttaaaaatatttacgtcttacaggagctggataatccaggtgcaaaacgaattctagagcttgaccagtttaaggggcagcagggacaaaaacgtttccaagacatgatgggccacggatctgactactcactcagtgaagtgctgtgggtctgtgccaacctctttagtgatgtccaattcaagatgagtcataagaggatcatgctgttcaccaatgaagacaacccccatggcaatgacagtgccaaagccagccgggccaggaccaaagccggtgatctccgagatacaggcatcttccttgacttgatgcacctgaagaaacctgggggctttgacatatccttgttctacagagatatcatcagcatagcagaggatgaggacctcagggttcactttgaggaatccagcaagctagaagacctgttgcggaaggttcgcgccaaggagaccaggaagcgagcactcagcaggttaaagctgaagctcaacaaagatatagtgatctctgtgggcatttataatctggtccagaaggctctcaagcctcctccaataaagctctatcgggaaacaaatgaaccagtgaaaaccaagacccggacctttaatacaagtacaggcggtttgcttctgcctagcgataccaagaggtctcagatctatgggagtcgtcagattatactggagaaagaggaaacagaagagctaaaacggtttgatgatccaggtttgatgctcatgggtttcaagccgttggtactgctgaagaaacaccattacctgaggccctccctgttcgtgtacccagaggagtcgctggtgattgggagctcaaccctgttcagtgctctgctcatcaagtgtctggagaaggaggttgcagcattgtgcagatacacaccccgcaggaacatccctccttattttgtggctttggtgccacaggaagaagagttggatgaccagaaaattcaggtgactcctccaggcttccagctggtctttttaccctttgctgatgataaaaggaagatgccctttactgaaaaaatcatggcaactccagagcaggtgggcaagatgaaggctatcgttgagaagcttcgcttcacatacagaagtgacagctttgagaaccccgtgctgcagcagcacttcaggaacctggaggccttggccttggatttgatggagccggaacaagcagtggacctgacattgcccaaggttgaagcaatgaataaaagactgggctccttggtggatgagtttaaggagcttgtttacccaccagattacaatcctgaagggaaagttaccaagagaaaacacgataatgaaggttctggaagcaaaaggcccaaggtggagtattcagaagaggagctgaagacccacatcagcaagggtacgctgggcaagttcactgtgcccatgctgaaagaggcctgccgggcttacgggctgaagagtggtctgaagaagcaggagctgctggaagccctcaccaagcacttccaggactgaccagaggccgcgcgtccagctgcccttccgcagtgtggccaggctgcctggccttgtcctcagccagttaaaatgtgtttctcctgagctaggaagagtctacccgacataagtcgagggactttatgtttttgaggctttctgttgccatggtgatggtgtagccctcccactttgctgttccttactttactgcctgaataaagagccctaagtttgtactatatactg

SEQ ID NO: 173 - protein, 597 aa, Homo sapiens; identical to SEQ ID NO: 171

SEQ ID NO: 174 - DNA, 56210 bp, Mus musculus
  misc_feature (1)...(56210): n = A,T,C or G
gtagcgaatgtcccgctcgggtctgcgcttcggaaccgcggcgtgagcgccccgggaagatggagccgccgccgccagcgccgccgccgcttccccgggctcccccgaccctccggggtcagcaaccactgccgccaccggcgcccggtctcccggcgcgcgaggtcccggagccgcgggccaggacgccgccgagggtgtagagcgctcccggaggtgaggggccgcggccgggaagtttgtcgggacagggctccgcccggtcccacgggcgagctgccctgcgggacagggacaacccgtccgctgggtcccgggcgggtgcggagcagcgggtggcggcggcggggcggctttgttgtgnnnnnnnnnnnnnnnnnnnnnnnnnnnnnnnnnnnnnnnnnnnnnnnnnnnnnnnnnnnnnnnnnnnnnnnnnnnnnnnnnnnnnnnnnnnnnnnnnnnnnnnnnnnnnnnnnnnnnnnnnnnnnnnnnnnnnnnnnnnnnnnnnnnnnnnnnnnnnnnnnnnnnnnnnnnnnnnnnnnnnnnnnnnnnnnnnnnnnnnnnnnnnnnnnnnnnnnnnnnnnnnnnnnnnnnnnnnnnnnnnnnnnnnnnnnnnnnnnnnnnnnnnnnnnnnnnnnnnnnnnnnnnnnnnnacttcggccaccagcggcgtgcaggaggcggccgggtgaaaacttatgcctgtgagtgtgagcgggagagaactggacgtgcagattttgttgacaaaaaagtttgagcgaggacttttcacgcctttaaatttcccctgcttgcccgtaatgtagccgcttattagggaatttgtaccaagtcttgctccatatttttagtttaaccccaggttaggtcagtaaatgatgctcaccagttttgagtgctaaatctggagacaaggctactttttgtgatttttcttttctccccttttagcaactgttgtaataaggcgctaacaaaaaaaaaaaaatcttccagcataggaatgcagacgctgcttagaaagcctgtttttaacttaactatagttaacaatacattacagtattcagcctctcgtaaaattttggttatccaggtatagaaaacgctgttgaacgaattcaccatggttcctttgaaattgcttaacttttaccacacttcaaaatgtcagcttcatatggtaccaacagaggctgctatacagaattacagaatccgaagttttgaactgagagtttttcagcttcgccatctagttggaatagtataaatgtaaattggagctgtgggttatttctttccttcgagaaatcacggccttggtgggagggactttcagtggtgggagggactttcaatgatgggcggggaacacgtttacaataaaatgccttgttattttaaatgctgtgttgtaaatagcctgccctaggcccttaaaacccactggagagtagaatggaggttggagctggtaaatccacactaaactcgaacgaaagctattggggaaccatgtgggggagggtaacgcgggggtgggggttttgtgtttgtatcgggaaacctagaccaacacaacgttttgtatttatttcatgcttgtaatagcgcgaaacttttaagtaatatttcgtactatttaaaaatagtatgcttgaaggactacagatgataaatttaatgcatttatgttgtcttggctgtgaatgtgctgtacaaatggttgatatgttccagtccacagaaggagcggttcagcttcgtggaagctgtagaaattaccagaaatctcagtccttctaaaaagctcattgcttggtgtgttctctggagcagctggagttgagggatgtgtaaaggcacaactgttgtgtcaccctctgaggagcacgcaccctcagagttttcaggacttgcttgggctgctaatatccctgaatgttagttaactgctctctctcaatgcttttaagcccaatgctacttgatttgttgtttcatcttgaagctataataaaacagtaatgttggaagtagagataattggtggagatactaaaattaggagagaaatttggcactgcttaatgcttgccgttcacttggcaagtactttatgttggttaatgtctagactgtgtcgatttcattgtgagagtggtggattttttttttttgtaaagttaattaacaagtactttttgtttgtgtgccaatatttgacatacataggattttttagggggagaggaaaaatggaaagtgttatatttcatagcaggactttgcatttcttgttaattctgattgctgatacctttgcagtccctgccggtctctaaaacagttagggaggcatagaccttgaagaatggaagttggctttgagtgaagtaggcctgggtttagaatgtgaacccctctgcctgctgacagttatcagaagtaggaatgctgagggctaacactttccattactaattaactccatcctacccccccagtctttctcctgttttatttatttcataaacattaaaagtccccagccccccacccccggcagcactgtctgactgcctggatacattcttcactcctgtgactttatacagaagttggagtctcccaagagtagctccacactcctccatcagctgtagcccttcatcttttcctgttggtggccttagatctaaaagaatcatgcttttgcattaaaataggctggagagtgcatgagcgcgcgcacacacacacacacacacacacacacatacatacacacacacacacacacacacacacacacacacacacgtacttgagctaggttgatttcccctctggggttctttaatagactgtacatcatgggggacttggagagggctgggttcagaggaggcaaagcttgctcagatgtggactgccaatggaggtggtctgtgttgtcctcttcagagacttgctcctagaattctgcagggaacgcttgtctactgtgatcactgcacacagactcaccaaggtcttacgatgaccggattattggacagtggggaagcagtgttttcctgaatctctaagaagacagtcactgctttccttggggagatcctcctatgaagggcagtctttagcctgggactttctggggtaggcaggactggggtggtacatgtatgttgtgatttcaataacaactggaggttttggtctaagagatgctgttttaaaatgtgcccccctcccaccccccaaaacatataaacaaatgacaggaaatgggaacatcatggcaagcatttgccagtccagtgcagaagagccgaggcagggggattgtgagtttgaggccagcctgggacacacagaccacgtcgaagacaaggctggcaagataacccaaatctaatgacgggagtttgagtccctagaacctacatggtagaaggaaagaactgactcctgcaggttgtcctctgccctcaggtatgctgtgccattcatacacatacacaaacaacaacaaaaccccagtgtgtacaggtacaggttttggctggctcactagttggtgtttgatgtgtttggcagcctgtgtgggactggaaagcaggagagtaagaactccccacatgtgctagcattctgctggagctgggtgggtagggagcctgaaggaatgaatgcctaacatgctggctcagtggttggtagcttcccagctcagaagaggacttggtaatgggctctcattttgcagtttgtttggggtcttggttttgctttgctttgaggtagggattcattgggaagccctggctggcctggaactcactggctggcctcctgagggctgggcttacaggtgagttacttagttgtttctggttttcagtttcagtgtcttctttactctaaaatatatttaaatcagttattgccaaaactttcaaaagctggacttacttattttattttcccaagggtcatatttataaacttattgatgaaggaaaaattcccatctgttaggtcttgttaaaatggcgtgggagtcactcggtgtagctcatccccggctgtaggcttcatttgactgatgagtgtttccatgaagaatttcatttaaaagttcaagtttggctatgaaactaaggtttagtcttcaggctaaaccttaaaatacaaggtctccaagctgagacaagaacttttcttctctatgacactgaaagtctgcttctttctagatgattctgtctgtcaaggaccagggacaccagtaggtgctgtttaacataacctcttaaaaagacagtacctggggtgttctaggaccagcacctcctacaaaatgtgggggagagatggagagaaaatcaaaaccctgaaggagaccaggtggtagctttctgaggtgtcactgaagcatcctcctagcctgtgcttcaaatggctcttgagtctggagagggcagacagaaccaaagcacttgacccttccaggcccctgctgagctccactctgacacagaaaggtcttgactttttctgctctggtcaactgtttatattttgagacacagtctcatatagcacaggctgaccataaactcagtgtagccaaggattctgaactcctgctcttctgatgcacccaacttcatggggttggttttgtttgtttgtttggggaggggtgggttgtgcaataggagttgccatggctagaactcagggcctccagcttgctaggtgggtgctgtacactgagccacactgccagtcccttggctggttttatgactggagtgtttggagaacacaccgggacgctctgtggaagtcctcctttgtgcatttgcgtgtctgagttagagtgacagaggggtgggatggtttgtgagccacccctggggtttaaattccagtcagagtgggactttgcctgactattaggtcccagtgtctagggccaggaatgtcatctaggaaccatggtttagaaagagaaatattattcgtgtgtgtgtgtgtgtgtgtgtgtgtgtcggtctgtctgtctgtctgcaagtatgtccagtttagttccatgacattaaatgtattcttgtcacggtggcagatagcatttgtctattacctcagggcatcaggccgtcacttcctgtttctttgcttctgattagtctctgttctgtccctggatttgcttactctaggtatgcatcgtgagcggagtggtactgtgtgctttgtgagcagctacttcattcaacacatgtctctaaggccatctgtctaccttgtggcctgtaatgggacttccgtgttaagactgagcagtagggcgtggacatgggaggctttgcagtggtcttgtgagaactgtccttagtcaatttttttttttttttgcttgtttgtttttgttttattttggtttgtttttgagacagagtcacaaaatgtatctctggatggtttggaacttgctgtgtggactaggctagccttgggattaatcacagagagatacacttgtttctgcctctgggattaaaagagtgtgccaccatgcctggccgtattttgtttggccattggagtcatactcagagaaagggcattgctgtggatggagctctccctgcccagaccagttctctgtgctctacagtacctgctaaggatgtaggaggactgcttttgaataggtatctcctggctgaatgtggccatatgtcaggtcctagagggggtgaacagagtgctctgcctgtctcagacagcttgcagaaaagcccactggtccatcttgtaggcagatactgcactggagtaggtgtgtgggagtgacagttggtcccttaggttgctgtccagggggagtgagcagttctcagtgagtttgttctcagtggagtataggcctgtgccatttagaagagaggaaagacctggtgcttttaacttgcatgggatctcagagtctactctgccctggctgttgggccatggtcacttctgtgtgcagcctggtgcctgcttgcaggactgtcttcagtgggcttggaacaccactggattggcattttccctgggacttttctccttttcagaccatcctcccaccctgactgacaaaggaggcacatatggacacacctgcttccatgttcattgtggcatagtttttgcttcaatgctgaatctgggcctgttcttgtctcctgccctgattaaaactttgcgcctacttgttgtgaacacttagatgtgtatcactgtgatacactatagccctgtcttgaaaacatcaccagttccaattaggctgggccacttatctttatcttctagatgctagcctgggttagagcccaaggggtttttagtttttggggtccccccccacttttctttcttttttttcttttaaagatttatttatttattttatgtatatgagtacaccattgctctcttcagacacaccagaagagggcatctgactccattacaaatgtggttgctggaaattgaactcgggacctctggaagagcagttggtgctctttactgctgagccatatctccagctttcccatttttttcaaaacaggttcttggctatcttagaactcactcagatcaggatagccttgaatttagagacccacttatttctgcctctctagtgttgggattaaagacatgcaccaccatgcctggcttttttttttaaatcaacttttcattaacacatttcacataggtcttaaataattgattattctgtctgctctcatcttaacgtttatgctgcacagtcacaggctggccattttttaatacctagtgagagagacaccttgtatagatgttcagtttgtatactggtccaaagtcctacatgtatgagggtgggattcatatcacaaatataaccattcattaatgttgagcgtatttgaagactctggactactctcagaggacctggacagcaaccaatcaccatccttgatagtattgtgcacattttcttcagagtgtgcgtgatcaccctcttctgggacatgtgctgagacgattcctttttttttttcctgtccctggaagttggtccagtttctgccatccctttggtttagactcttcctgcccgactgtaccaggttatggcacgtggtatcagcgttggctgtatgtggcgggttgtgcttaccagacctggaaaatgcccagggcaagagctgatgtgtaatgaaatgaagtgcatcccggttccctcctcacagctgccatgcgctggccaggactggagggaagcattggtgtgggaagcaaggccttggagcagaccgatcaccacgtctcctcctcctcttcctcctcctcctcctcctcctccttttcgatagagaccctgagcttgtgccagcatgacctgaaagccaccatgcgttagtgcttggagatctgcacaggagaagagtaccaagcaatgagtgatggctgctgccacccatgtcatggacaagtgagcaagaatcatgccctaggtagcaaaagagaagccaggggcctcataatcccacaagaaaaggacagaagcccgtcaagctgtcttagtcagggtttgactgctgtgagcagacaccatggccaaggcaagtcttatgaggacaacatgtagttggggttggcttacaggttcagaggttcagtccattatcagcaaggcaggaacatggcagcatcgaggcagacatggtgcaggaggagctgagagttcttcttcatctgtaggcagctagtggaagactgacttccaggcagctaggatgagggtcttaaaagcccacacccacagtgacacaactactccaatagggccataccttctaatagtgccactccctgggctgagcatatacaaaccaccacactgatcctaggtattgggtttgggcaaggggtggtagtgacatgccacctgatgtagccattgactctgagcatgtgagctccttgtgaatgctgtcagcctaatgatgtatgcactaggaaaagattgcccatggtccccagtcctctgtcccagcgtcctccgaaacagcgtctgtttcagaacaaattccagggtaagcttggatggcttgagccaccagggcctcctttgttgccctgtgaccaggccttggcgctgggatgcacaagtaatatggcttaacatgaaatatggtttaacagaactttgtatcgctgctttcttcatagccctggtcttgcctagctgtgtgaaagggctagtagacctctctatagtctgcttacatcctttggtggtaaactcttattgtcacagaccataccttcccaaaggaatgttccaagaggaacttctatcctctgtcctgatgaccctatggcatgtgtgaatagatagctacagtctggttaaatgcctgagactcttatgggcgctacttgtacctttaagcccagaccactggtttgtgtaaccaggccttggagcccttctttgatccaccccagcatctgtggacaggagtgctgcactggctctagtcagcctctggattcctggccaggaccctgcttcttacccagcttgtgcacatttgccaaaggcccttcttaatggagtcctgttgcctctggtttgttcccagtctccaggaaagcctcagcctcactgttgaaagccctgtggaggagactgcattcttcctccagctggaattccactcccacccctccccaggcagactccttatctcttcagtttctctgaccttcccctccatcctcccatcctgggcttggattcccctcctctggggcctctcctctgcagctcatttgcttaccttacttaccctctgcctcacttcactgtaaattgctgaaggtgagattcttagtcactctgtcagtgcctgagacttcctaggcattcgacccatgcctgtgatctaagctgtggggaggctgagtcaggaggattgtgagttccaggcttaccttgcctatatagcaaggccttatctcaaaaaaagatgccaccaggggctacagagatggctcagaggttaagagaacttgctactcttttagaggactagcgtttcattcctagcacctacatgggtctcacagtcaatcataactccagttccagggagtccaatgtcttctgactcccagaagtaccaggtgcacatatcacactctcaaaataaagactcctccccctttacagagtagagggtggaatgaatgcatgatgtcatgtccctttcttatatgaatgtgtgcctttattctcgctgcatttgacaagtacctgctgtgtgctgccccacaatgaggggctgtaacctggaatactgagccaggcagagccttcctcccctaattgcttattgtcaagtgtttatcaaaggtgtgtttacagttctaatttttgaaaggaagggaagaaaatggaagctttagaaattgtgtttttatgtgacttctgagtggaaaggaagtaatcctttgccagttccctagctaaggagtcactcccaggattctccacatgtgctttgcaggctcttagaaaccgtcctgcttttgttggaatgtgagcgtatggttgtagaaatctaggtctttcagaacagatgatcagtccaggaagtccctagaaatgagtgtggttgcaatatgccccgttttacatcagttaggcagaactctaggcttctgggctgtagccaatgtggggcctggggctcagctgcctgctctcatagctcactatctatatttctttacacaaccatttcagcgactcaagagtactagaaaccatatattaaaatgtagattccatgttgggaactttagtcgtctcctcctcctcctcctcctcctcctcctcctcctcctctgccatcccctcctcccctggtctacttccttttaatgggttcttgtcagttgtaatgagaaagtggatagttaaaacagtgaggaccactgtccccatacaaagcacagtcaatataatgtcatttctaatatttcctgctgaatgtggttatgtaacaacatgtaagttaattcatagaatgcttaggacagtgtctagcttgtagtaggtactgggtaatgttccttacctgtatttttgccccgtgtgaagaagtctgtgaagcagggtattgttttgtggttttggggttctttactggagctagaagtcccaattctttgcctatctttagagagtgctcttttgggggtcagtttttctttgtttattgaaactctaaagtctatcctttgaagtcagatttctacgctctttatagtgagagggagtcagagggaagagggtaaagactgggatgatctggggcgtgtcagcctgtctgtcctatggagggccctgcaggtgaagaccatgtgtgtggtgagggcgcagggaagggtgccaagctctcactgttgggaatatggatgcttcttggctcatgtcttgggtgacctcttgatgaatgcatcgtaaagtggaaaaattataaggagaaaatatatgcaatccacaaaccctacagctcacagctcagcagcacgaatgctgcagagtattgtgctcttctcttgtcatcccagggcagctgtggacactctagagcatcatcagagcatcaggccacaccctcgaaaggtagatagcccgggggagagcccagttggtcctgaggatagtgtctcccagtgcctttgctctgctttatgagagttgaagactctaagcttgacttggaatggaaaactctctctagtacttgctcactctttttaaagatgcatttatttcatgcatatgagagttttgcctgcatatatgtttgtgactggtgcctgaagagggcatcagattccctaaactggagttaagatgtttgtgttgtaccctgtgggtgttaggaattgaaccctggccctctggaagagtgacatgtgatcttaatggctgagctagctctccggccctgttacattcattctcagggtattgtggggaacactttcaactgtagtagagagtaccttcaatatggcgagttttggatctgttttattcagaaaaattggggaggcttcatcaggaaaattttcacaccctcaggtgggtgaatatgttaggtaaagcctcaggcttagggacagtggtgtgaatcaggaattggttgatattagggacaagccagaaatttactgggtatgtttaaccctaaatccccaagctgtggtttccagaattacatgatagtgagttgttgagacgcccgccgttgccctgggtggtggttgtggagacacttggctgtaggcttcctgttaaagggaccttcctgggacagctccagagccaagtagcccatgacacttctgaaagccatatactttttctttactctctagctggaatatttccaaaatcaccatgcgtttctggaaagtagctttaacattatgtgaaatccaaaaataaccacttttgtcccattttctttttcagagagtgatggtcttcaaaatgaaaactctggaaaattttaggttctctttaggaactacaaaaattgaaggacagcaattttttgaaaggaagttgttctgaaagcatgtttacaattcactgacactgttgactgttctctttaaaataataagacgctttgagaagattgtatttatggtaaaaggaaactggactaacaatgaggccaaagacttttcctgccacaacttactctggaaatagccggcagcgattgcaagagattcgagaggggctgaagcagccatccaaggcttccacccaggggctgctggtgggaccaaacagtgacacttccctggatgccaaagtcctggggagcaaagatgcctccaggcagcagcaaatgagagccaccccgaagtttggaccttatcaaaaagctctcagggaaatccgatattccctcctgccttttgccaacgagtcaggcacttcggcagctgcagaggtgaaccggcagatgcttcaggagttggtgaatgcgggatgtgaccaggtgggtccaggtgccagcgcccttcagcagctctgggcaagctctgaactcttctcacactgcccttttctgtatcccttagccagtggctgccttctctccaagggtcttaggcacttttccttcttgaaattgttccttgctgctttttcattcattctgctgtgtgtgtgtgtgtgtgtgtgtgtgtgtgtgtgtctagaacccagggtcctgtgcatttgaagcacacgcttctctgctcagctgtgcctgcttccagttctattcttagcgctctccttgggacctgcttgggattattccgagcttctgtggacaagagactggcttctcttaccttgtttttggtttgtattttcatttccttcctgaacgagtgttatttatatttaacacgcatgaactagtctctcttttctattgtttttgttttcttaaaattttatttgttgataattctatacctgtccttattctgatttcttatttattgattttttttaaaaaaagatttatttattttatgtgagtacatcgctgtctttagacacaccagaagagggcatcagatcctattacagatggttgtgagccactatgtggctgctgggaattgaactcaggacctctggaagagcagtcagtgctcttaactgctgagccaagttaacttgcagttaacttggctcttgcaggcattattcagtggagttacctttgcacggcaaagcattttgagtgatgtatggcctgccatagcattggaggctgacagcagccacatggcctgtcttactgtgagagtaagacagctctgggtgcaagagcggctttcagggccaacagcaaatcttaagatccttcctactgtaaatttgcaagcaaaagaggcaatcagagcctgaagtggaagagaaacaagtcaaacaaacaacccagagtacaggtgggctcgcattgaagtaaaatccattagtggtaatagcagagcgagaaaagaaaaggaactgagtgcttctctagtgcagtgaaatgcaaatacaggaaagctaaagcacgggcccatccatgcctaatttatgttaattgctagcagaaaggccttccatttaccatagtcaatgctcccgaaataattctgtccctttgcagtctagtgttcctttaaaacttaaaacagctgcacccttcttccctccagctctggaaagagtgcattcgctttcagaaggttctggtaggaaagtcatgttgtgaacacagacaccaggaggggagggctgacagtgccctggagctgtgtgtggtggactgaagctctcgttagaatctgtgcactaggggaaacacagtcttctcctcccgccttcttgggccttagaacattagatgcaacttggtccttccctagtttgacttaaattgccctctctaggttttctgtaatcttgcagagtaccatgtttccccgtggggcatggtggtggcggcccatgattttttccacacactatttctttttgagctaggttcttgctatatgtccagactggccttgaactctggagctcaggtgaacctcctgttttgctcttctgatcttaactccacaagtagtatcacccatgtacacacacatgtgcttttctatattgtttgtggtatgactagttgaaaatagttacttgactgcttgaaatggtcattttctttgttttgttttggttttggtttttcgagacagggtttctctctgtagccctggctgtcctggaactcactttgtagaccaggctggcctcgaactcagaaatccacctgcctctgcctcccgagtgctgggattaaaggggtgtgccaccacgcctggcggtcattttcttttaaaagtcatattaaggtaaattttacattttaaatgtgcacaatttataaacttacagccccattaattttcacacattaattacagccgtatctagcacatatgggtactttttaaattaaactgtttaaaatggaagtatctggaaaaagtgaatgacgttaggatattttcaatataacagcgttaagtgtttgccaaatgatatactgcgtacataagatgtgtaacttttgcaaacaaatcacatgaagccttataggcaggtaactaggtttatgttatagaaggagctagctgttctttagctagagattgaggccttggaaggtgaggttccacttgcacaaccgcacagtctgcagcgctggctgcatgtaggtagcatttctctgggggcctgtattctctcctggagctgtagtgggtgacaggcaggtggaacccctgcatggtgagggttgcagacttgttgggagacaggaacatgcacttggggtacagaggtgttgcttggagacaggagggtcttccttatggtatacatgtggaggtgctgctgggtgacaggcaggacacctgcgtgggttgctaggtgcatgaggttcaggggtattgctgagacggtagacggcttctgcatccttcatgtggggtcattttttggtttcctgttctcagggagcctgaggtcttgagtgtagctcctggtgcagacccatggcttctggcagtcttagaatagcaccttccccaggttgtgtcccttagggaaagatatagatgagaaatttctttccgataggagtactaggaaatggctttgcctcccttgaggaatgctctttgctacctggtccctgaactgacctgtggtttgtgcttgtctaaccagcctgtcctttgtgtttccatgtccttaacagttccttggccctgggtttctgtgtcaactgtcgttttcctaacctaccccatatgtcctcaagtaattcaggtctttaatggaaccagggcagagagaatgtagacaaactgactttcttcaccgcacacaggcagtggtcaggatgtgcctttttgcaggccggcttcctgacaataggctcagtgcgggtgagcgagatgctctgggaaattagctaaggaagtcagttcatgacattcgtaagccatcaagggaagaatgtgaattttcctcagcagtcacgccagcttttggcagcactacaaaggggtggagcccccattcactaggcagtcacctaggcgtgagtgagctgtgtgagacaggctgtaggcccagttttaagctacagtgagttgaggagagtcagaaagggccccacctgcagagcacttggccagatcgtgaggagctgtgtgcctgactcggactccgagtggaggcaaggagttctggtttgacttgggatgcttgtcaccaggctcagtgctggatgactgttacttctcagtctgttctgtgtgctgtgacttctcccttttgtcccctcatagcctgctgagggtggcattttgctggcggagtatacagtccctgccagcactggtatccccactactccagctacaatcctggtcctcagcatgctccaacagtctattctcctcagggacagatttctgtcagtttgctggcttggggccttcagggttgtattttatagctccccccttcttcctggggggatcctggtgtctgtcaagcttgctttgtttcagcagcagcctttcctaaagtccccatgtgcctttgagctgttctcttttgccctttatagcaatttgtttccgactcacagggcactcgatttgggaggcctgcgatggcaggcaggctgtggtactgtggtttcacttcccctgctctgaggcctggctttcaagagtccttccagtgctccacagcctccagctgctggttaatatttgccaaagcagatgtgagtcatactggtccaggcaaaagcctccatcgcctcccccaacatcaaatgagggatagtccataatccacagagcacttctttatgaagtgtatctgattaacctgaagagagccatagagagctagatgtgtcatgtatacctgtaatgcagtgctgagcctgagtcctccctgggtgatgtagggagaccctgtctaaagcaaggaaagggaaacaggaggaaacaatgtgcaaaggactaagccaagctgctgtgcgtggcgttcgttgtgacaggatctgcctccactgaatctcttaagtacaggtattggccagtgggaggacagtggatgtagatctcagatatttcctcctccttccttttttctggaacgggacccgcctttcaacatgaacctcccctgaaatactagtaagtggggaaggaagaaagcttgtttcagtttgcactgctggtgacaggaaatggctcacaatggtctttgggtgggacagctgtttgcctcgccatcttctcctcctcgtcttcttcctcttccccccccactcctcctccttttcctcctccacctccttcaatggctttcaaattatttggcctgaccaaaaggtaaacttggtgaaaaaggattttagggtagcaccgtggcagagtatgtgcctagcatatgcaagggtcaccgtggcagagtatgtgcctagcatatgcaagggtcaccgtggcagagtatgtgcctagcatatgcaagggtcaccgtggcagagtatgtgcctagcatatgcaagggtcaccgtgacagagtatgtgcctagcatatgcaagggtcaccgtggcagagtatgtgcctagcatatgcaagggtcaccgtggcagagtatgtgcctagcatatgcaagggtcaccgtggcagagtatgtgcctagcatatgcaagggtcaccgtggcagagtatgtgcctagcatatgcaagggtcaccgtggcagagtatgtgcctagcatatgcaagggtcaccgtggcagagtatgtgcctagcatatgcaagggtcaccgtgacagagtatgtgcctagcatatgcaagggtcaccgtggcagagtatgtgcctagcatatgcaagggtcaccgtggcagagtatgtgcctagcatatgcaagggtcaccgtggcagagtatgtgcctagcatatgcaagggtcaccgtggcagagtatgtgcctagcatatgcaagggtcaccgtggcagagtatgtgcctagcatatgcaagggtcaccgtggcagagtatgtgcctagcatatgcaagggtcaccgtggcagagtatgtgcctagcatatgcaaggtcctgctcccagcccttcataagcccagtaagcaaagaaataaaatgactgaggcgataaaggattttctactgtgtcatccccgctcttgggtcttctctctactagataaggtatgcctcttcatggacgtttagcaaatacagaaaggtaaaagacaagagttgattgcctgctgtccatcccagtcttagccaggcccaaccctgcctttagctttggagattagatagattcagggtcctgtggctattgagagattgccggtaattttatggacatggatatgaccactctttaacattttgggtttaaatatttttctaatttaaaaaggcatgtattaagcagtatatgaatatactagatatgacttttttttttttggtttttcgagacagagtttctctgtatagccttggctgtcctggaactcactttgtagaccaggctggccttgaactcagaaatctgcctgcctctgcctcccaagtactgggacaaaaggcgtgcgccaccaccacccagctaacatgactgtttttttaacagcaaaatatgttctcattgtatgtaatagtttgtgagcagctctcttagcacccttggatcttttcatgtctggaaacattccccaccatcctcagaagggcgctagagaacctgtagccttaggctgcccctgtgccctttgtcctgctctggtcctgtggattttgttctctgacttcctggtgctgtccccccaccccaccccaggctgtcttcaggcagagtttctaatgaccctttcccccaacctccatttaaattagatccctttttttctcaccctgtaattccttcttggcatttatcagagcttgttgctaagtggtagaacgttgtaagccatagcccaagaccaaaacatttttttcttagccaccagtttctggaactcagagccaagcaagcacaaaaatagccataagcaagtcaaggggcagacattttgacatgaacattttcatgtcatttaatgccattctaaaacatgacttttaaagcttgcattgtagtctgttggtcacataactgtcccttattttatcatgaaaagctggagcgagcatcttcttcatgaatctgaatggatgattctccatgagctgagctggtttcctcagtgtaaatcttaggaatggaattactaggtaaatgacagttttttagtttttacctgtattgctgaattgataattacgcttaggcatgcaatcctgctcacctggactaagaaacagccctgggatagttgtcctttatgtttgatactggtgtgaatatgtgcaagcagcataagtaggtggaagttattagaggctcccattgggtatcagaggctgacctgctcctgttcacgcaggaaggtatctctctttcctctccagtgggtacaattgtgatggtgcaagtcttagctgactttagaatcccactctgtcaatttacatatttgagagagctggcaatggtcagggagatgggtgagacctgcttgttggggagaagccagtaagacactctggagccaatcttttccttccccgctgcagcaaccagggtccggaggttgctcctcacagctcctcactaagctgagaccggaacctctactttaagcagccttttcccctgatcccagccctcagtacaaatgctatccttttctttgtgtgccacaatgtgaagtttgctagcaatcacaaatagatttacttgaagcccattttgtcaccctgaagttttctatctcaattatgtggtggtcagctgggatcccaggctctaacacaaatgtaactcagacaggaatcatagcagcctgccaggaggggtcttggggaaggctctgcattccagtcttgggtttgcaccgcctgccagagacttttaaaaactttcagttgccagcaaaccattttgtggatcgagagtagggaatgggctggagagatgacacagtcaagagcactggctgcttttctacagaactgggtttgatttccagcgcctgtatggcagctcacagctatctgtaactccagtttcaggggaccagcgcctccttctggcatcctcaggcactgcatgcaccgtgcacaggcaaacacgcaggcagtgttcagatgttctgagtgttccttatgtctttactggggtgtgggaaactcttggagactctgctttttaacccatgtccctcagctcagcgctgctctagcccagtctccctgtgtcgggaacaaggtgctcagttgtagtcagaattctggaatttggtttctttaaagaacacagatatactgtaagaatatgtttctgttttcatcccaggtatgagatatggggctgcttcagactgcagctgactatgatttgccctgtgctctagcaggggagtgattttgccagctgcagatagtttctgcaattgtgtgagatttggaattctgggaacttttaagagctagggccccagaagtggggctggggggggataggtggttgtttggttgttggttgttgttggtcatggtttgttaaatagtcacatacaaagaagaaacaacaagaagaaattaaatattctgatggtgaagatcaaacttgcccccaaggaacttgatgtccgtaatcagcagggattaatcaacaataatgtcgccccctttctgactcctgactttatttagggatctctttcctctctatacctgtttctgtcttatctggtgttagggtgttggaagcgtggaagagaagaatctacaaagtaacaaagacaggctacactgggtgatgcttcaagtgtcaggcagacaggctgtggaagcactacctgcactcgctggccatagatgcccaaccccagggatactgccatagatagaaaagggtagctggagtgggcaggatgtggctgtcatgcaaggaagtcccatgatgtctttaagaacttgggtgtcatccttcacaagtggtgtttttgtttttgtttttcatccagctatggaagaaggtagggcagcaagagctctttcttcaagagttcccttcctaggctggggcctgggagctgaggagcctcagcaataggcccatcagccagcagaaggccattcctgccaaaactgtgctgccagttaggaagaaagagattggggctcttattaggagtctgtggtataactacatcatctggcatgatcaccagaaagagtcttgtctctagattattgagttaaatactcttgcatcatgagccatcttgaggagtaggaaagaatgccttcctgcacaggctggcacatggctggagcatggtggcaaaacccagtgccatcgccatattttgttaattacaaagaccattgtcctctgaccagctttcagggttctggtcccctttggaatcacatgaagatttcctcaaccctaagatctgtgggttggatgggtatacatttcactggttatgatatgagaagaattattaatcatatgatagacatggaagttgttttgtacaaaaataagtgattaacaacaaaaattttatcccagccagcaagtaaacattcaatgtaaatgtgacacaatgtcatttggtttttattcagcaagagagccttggctggtgacaagtgacatctgggagttctcaagaatgtggcagagtagaacagagtgaacccctcgtcagctgtctctttagtgtcttcgaggccgctccaggaagctttgtggctgctgccttctctctttgcctccagccttctgttctgcctggctgttgcttcctggttttctgatttactttggaaatgttcagcaagcagcagtagcctcccccagctggaatgagccagtaagtcttgccctgtccctctttcagatgccaatgatggcttcagggcccttccctagacaggaggctctgctacctccgcctctctctctagtgcctctcctttcctgcaagtcccttttgcccccttgccctctatggcccaggaacgccctgggcactcctcctgggtctggataccctgtttgtttttggccagtgtgttagtgggcactttcctcggtgcctgctgctttttcaaagtgctttcaaccgtgtgttgtcactgtagatctctgctctgcatctaggttctgttgccttgacccagtaactcttccagcaagcttccagatgcagcatccagcacctcatgtgggaccctgtccctcttcctcctcctatctgatcccacttatccggtagactgcactatttctcatgcatcaaatgtgtttgcctttttctccctgtcaccaagctgtgtgaccttatcctttctggctttcctcatattgtcactccagctggagtgcaacctgctacttgagctacatagtcacgctcccactgccctgtggtctctgcggccatttggctcagtgtaggctgggttcagtgcaggctggcccctcagctttctgaatccctgttttgtgagagctgttcatggcatcgtggtaaatctctgcaaggtatcaccatttcaacccagtttgtccacagttgctaaactgcatggtactggagctacagagctgtgaaggggagaggggaagggagctatttagggtgggggaggaagaggggaacgaggacgtcctcctgtttattacaacataacatcctcaggaggaaaattgaggcatcaccagcccaccacccatagacagttactgttgcttggttatgtgaatgcataactttgttttacagaatttcagaaagtcagtagcatagtgaagccccatgcatccgtcggctcgggttttaagcagtgtgtcttcttgttatctgtctctgggagttttaaaaacaagacttaagttgaggtacagtgtctaggtgttttaagaccaaatactggcctgatgcccctcataaacactttaggacactactctctaagtgacaaaagaacacgcaaggctgtgtgtgggctgggatggctccatgggtcaagtacgtgtgtgctagtctgtagacctggggttgtataaatttagccctataataaattgttttgtttttagtaaattcttgctttctaattgaattctgagtattttacacttggctcagaaaatggccttttggtttatctaccaatttacatacctgctaaccaaaaaaaaaaatcttttccaagtcaaaactagcccacatctgctgtaatggaggccacggaaacgggaaagcagtccagacagccggcacagcgacagctactcactttggtttagtggtagaaaggaagagaatcttgccacttaacagagggatggtggcttcgaaagcctcattttaaacttttatttatttttattttatgtgtatggtattttgcctgtctgtgccaggccagaagaggacatcagatcccctggaactcatgttacagatgggtatgagtcaccacataggtgctgggaactgagtccaggtccctggaaggacagtctgtgcccttaactatgagccattttattttgttttgttttaataccaaggctattatatatcccaaggtggccttgaactcacagagatatgtttgcctcagcctctcaagtgctggggtgaaaggcctgtgtcagaaatgcgtcttcataaggaaggtatcagtggctgatcgcctgtgttccaggctgtggaagatcttgaaccggtcaacagtaagtacagccgataccagctcatatgtagtacttgtaagtgtggcagtatggacatgcatgtgccacacgtgtggagagggcagaggacatccttgggtattagttctcattttcccttgcttgaggcagatttctttatttccagatgcatattcctggtgcgtgtctgtttctggagatgctcctgtctgtccctcccatctcccaaacagcagcacctggattacaggcacacaggctgctacagctttgcagtgtgtgcgaattcaagctcggaccctcacacttgtacctgaagcacggagccagccgtcttctcagccccttatgtccataatactagggcttgattctgaacgtgagaggaaatgtggcacttggctttctgaacttggctgattttgctccatggatgacctcaaattgcatccatggttacagttttttgtcattcttacaaatgtgactttgtccttcgatatggcctaataaaacgcctttgtgcttacctttgtgttttctttgtttattgatgggtactaaggctggttccatcacttggcttttgtgaatagggcatctgtgagcgcagttatgtattcctgttgtgtgtgacttaggctcctcaggtaaacccagcagcaatagggctgaatcatagctatttgtaactttttggagaatttctacacttacttccagaggagctgcataagtttaggttctgtccttttcctttcctttcctttcctttcctttcctttcctttcctttcctttcctttcctttcctttcttttcctttccttttcttttttctttcttgacctcccttgcgcatttgtctttgttttctttatggtgcccaccctgatgaggtgagaccggactagagagcattcatgttccttgacaactgccgggacacacacacacacacgggacgacatgctcagaaaacgttcagtccgcttcctccttttttgactatttggctttgcaggtgttcagacttttgttttttttagttcttaatagattctagaaattaaattcctgtctaatgtatagctagcaaagccctttttccccatgttgtaagctgtctagactctgttctgaattacctttgctatgcagaaacctttggagtccacataatcccatttgtcaattccttcttggcctgttggagtctcgttcagaagacccttgtgtttgtccacatctgaaaccgttttatcctcgcaataagtagtcttagttcttgcattaaggccttcgatctttttaccttcgccgagtaaaaggtaggtgtggtctcactcctctgtgtggatatttggtgcccagctgcctcttctccagtatatttttgagacacctttgttgagattcgatagctgtagctgtgtggatgccttttcctctgaggtgagtcctttaagtcctttattctgttgtattggctcgagtatctgattcttaactagctctgtggatctagtactatttgaaatcaaatgctgatacttctaatattggtttttttttttttctcctcatggttgctttggttatatggggcattttgtgcttctctacaaattttagggtttgtttgtttgtttgtttttccccctctgttcctgtgaggaatgtcagcaaaattttgatggtttgtggtgagtaggacatttttgggactagagtaattttcatagcattctgctagtccatgcatatggaagatctttacatttttttcttcatttttgaaaattttcattttacctacttgcctagctttattctaaggttttgtgggttatgttttgtttttaggctgttgtgaatgggatttctcctgatttccttcttttaagatttatttatttatttatattatgtttgtgtgtctgcttgtctgtatttgcaccacacgaatgcagtgtccctggagcaccagagagagcatcagatggggtgggactggggttcagcttgtgagctgcctgattcgggagtggatcctgagccttccctgcggaagctggaagagctctccacagaccctggtgttgttgcctttgtatctttgtgttgggttttgttttgtgtgttcagtttgtatcctgcaactttgttaaaagtgttcacagatctgagagttttctggaggggtctccaggatacccctggagtataatcctataagtttagaattatattatctacaaatagtgataatttgacttcttcatttcctgtttatagccctttcattctttctcttcctttattgatctgtctacatagtcaagcactttattgtgtgaggccagtgagaatgatacccttccttatctccttcctgattttagtgtaatgtttgctatagtttgtcatatacaacatttactatccgggtgctgatattccttctagtcctaatttcttcagggcttttatcataaaagaattttggactttgtcacagtcatttggccatttctgagtctcttgaggtgattttcccaggcgtatttatttgctgttttgcatgtgttactttgcatatgttgaaccagccttgcatccctggactgaactgacttgatcgtggtatgtgattttctatgcccattagagaaatggatgctctgttttctgatcttgttgagaaaccctgtgtggtggagcagactgggattgtttttggtggagaaggactgtaacagtgtgaattgctttggttttcatgaaaaataaaaatgcaagtgtcagttctagataaaaacactcattttctctgtgtaggagagtggtgttgtgctcaaagctgggcctagtgaatagtttcgtcacttactataaccatcctgatgctctgacttctgggaagtctaggagccaaggatgactgtgttggcagctgcagtacgtactttcagtggacagaatgcctaacaaagacatcttaaaggaggaaagatttataatggttcacaattgtagagggtagtctgtcatggcaggagagtcatgacaagtagcttggaaccatctctccttttgcttggtccagagtgcagagtgagcagtgttgcccacatttcgggtgggtcttcccacttcactctgtccatccagtctagaagctccctcatagacatgtcctgagagctgtttccatggcaattctaaaccccatcaagatgacagtgaactgcacagcacaccagtgttgtatgtaggacatggtgtgtatggctttttctcttatgtgccccagtctctctgagtgctggtacaaagctgtgttttctctgttctcgtccttgggaagctgcacttgatagtgccaggcaaggtcagcaggtaggacttgcccctggtaaacacagctatttgaatgtttgtggagttgctctgggaagtttcccggtttctctgtgatgttcactgttcttgtgctggctccagggcagcagcctttctttgtaggtcagtgagagctgccctgggtagcccagcctctctgcaggctgctgttgtttcctaggcattagatagggtgagatgtaaaatttcattacagaggagaactttctggatgcttttaaggaaattaacagtacaaaggagaaacaactttttttttttccaaacttctggttttgaaaaccagacaatttttttttttttttttttttttttgcagtcccctgaatctgcataggagtgctatttaggagacatttacaagttaggtgtcttagggtttccattgttgtgaagagacaccatgaccattgcaactgttttttttaaatgtacttatttcatgtatatgagtacactgccgctgtcttcagacaccccagaagagggcatcagatcccattacagatggttgtgagccaccatgtgcttgctgggaattgaactcaggacctctggaagagcagacggtgctcctaatcactgagccatctctccagcctaccattacaactcttgtaaaagaaaacattgaattggggcaggcttacagtttcagagggtcaatccattaatgtcttgctaggaagcatggaagtatgtgggcagacatggtgctggaggagctgacagttctacatcatgatccacaggctgcaaggagagactgtgtaccacactgggcgggtttgagcatatatgacctcaaagccagcctctacagagacatacttcctccaacaaggccacacctccaacaagactgttcctcctagctgtgccactccctgtggacaagcattcaaacacacgagtctgtgggggccatgcctatcaaaccccacagtgggtattattaaagccaaagttagtttgcttgtcatccatcacacgacagcagtttgtcaggacttgtgaagttgtggtgagtggtgagcataccgtggctatgatgcagtccactgttcccactgttcttgatggtgtgtggctgtttccctcagttccacctcaggagttgtgtcctctgaagtcagatatccagtatgttctagagtcctggtcccttctgtatctgaactatggaatgtcttgcagggcaggattctcaggacagccacaaagctgctcaaaccccaaccagctctcctccaggcactgatacatctttccacccccgtcctgtcatctgtgccgctgacctggactgtccctgcatgtggagaaggaaagtggtcctttccagccactcagcaatccgaacttcaggctctgcagagaactggttccaagactccttctcttatgagtaccaaactccatgggcatttaagtcctttgtataaaactgcagtaacagggtgaggttggatatgcctgtaatttcagctttcaggaggctgaggcaggagggtcaagtatttaaaggcagcctgcattatgtgacaatactttgtctcaaaaacaagaaggcagaacaccagagtgctcacacagtatcttcacagaaccaattcacacacccctgtgaagtttatacagtctttccaagatgtttggtgtctgttttcatacaacaatcacatatgtagttgttagactgtatttagagaatgagaataacaacagacgtgtgggcgtgactagtacaaataattcatttttgaattttgtttttgacaggctatagtccagttcacaatcctctgccttagtttcttgagaggtgagatcacaggcttggccaccacacccagatattttttaatacgtgtgcgtgcgtgcgtgcgtgcgcatgtgtgtgtgtgtgtgtgtgtgtgtgtgtgtgtacacatgagtatgtgtgcaggggtgtgtgccatgcatgttcatgtggaagtcatagaccaatgccagacatcttcttcagccactgtccataccagttgttttggaataaggtctttcactgaatctggagctcactgacaggataggttgtctgttcaacagactctgatacctgtttctgccctagcatgggtttgcaggcatgtgctactgggcctaacattttacatggatgccagggataggatacagcagttgaggcctgcaagggccatggagcaccacggcatgtgtacctcagcctgacagggctgcacgccaacagagagcattggtgtgaaaccttcctagtaggtggtttcatagtagagattgtcaggcacagtccctgttccagggcacttcttcctgtcatatcaggttcataagctcacgcttcatcttaggtcagcattcagctaaagcaaccatggtagcagcaggccttcaaagggttggtttaacaatggtctgatgttttcagtggtcagaatgttccagtactggcctttgtttcatataaatggcctggcatgacaaaatgctctcctgctgttacttagctgtggagaacaaaaaggaaaacccttggatctcagaagtacccatctgtggtggctttaatgagaagggccctcttagggtcatgtgtttggatgctaggcgcatagttgatgtctgtgtgtggtagcttagatgaaacctggctgccttaggcttgtgtatttgaacacgtggtccccagttactgtctggggaggtcatgacatggagctttgctggctggctggaaatgtcaccttgagagtttatagccttacccccattgccagatggcctctgctttcttctgttattatggggtcctcccttggcactgtaatccaaaataagatcttttcttctataagtcactttggtcatggtgttaatcataacaacaggaagtaacaggacagaaaaggacataccagcgagtaaatagatcattccaatataaacactacaggcacccatagatggtgaaggccagggacagtaactgataaagccgtcctctgtgtggtgtgaccaagggaccacttttcccttttgtgtttttcattttttttttttttttcaagacaactctgtatagccctgactgtcctgtaactcactttgtagaccaggctagcctcgaaacctgatccacctgactttgcctcccaagtgctgtgaataaaggtgtgagccaccactgcccagcgactttgttttcttttagtaggcttttcctcaagcacattaattactacctgggtggatggggataaacatacagcccaggagctgctggccacccagcagcccctctgtctgtgcagccccctctctcatgggtctgacccagctaagcaggcaagaagtactaagggtcacacgatcccccagcattagaatagagtgttgtgtgcagagagattctgtcttctaccaattctgtatcctcattgatggtattactataggtgggaagtgccctgcccagtttgattagtgggtttgcatgaaagaaatatagctgaatacagtgcagaggctctaccactgagctataacctcagcccaagttacagctgagtaaggtcactcatggaaaagatgttcctccttgaactggctgttttatgataaaaatcaatacttagagcaactctcgcactcacctcccacccatgtttctgggtctagtgctaatgcaggttttgttttggtggttttgtttgtttgagacagggtttccatgcatcgtccaggcataactgaactctgaatccttgtgcctcagcttcttgagtgcagcggttgcatgtatgtggtgccgttcctggctcttgccactttgaaatgtggcttgtaatgctcatttccgaggatgctggcggggtttggcgcctgttgcagcatgagccccttgctgctcagccttgctcatcctacaggcctctcagtccaccatttccttcttaagttttcaagggcttagactctgctcattgactacatggcaagggtgtaggatggattttctaaaataatgctaaggtagcactagataggatatttcatacaagagttggacgcttcgctaacaataataaatatagcgctctgtcctgtattttttggctttgaacttgacaacagccagctagtattttacccctggatcttccagacctagaaaaaatacataataggtgttaaaattcctggagcatggtaaaggctcactactagcagagactggaccaccctgccgtcactcctcacagggaggcctcttagctgaaagagccatctcagaagatgctgtctgcttggacacttgccctgtgaggtttcatcttagctgccctcctttaatgtgagtgtgtgtagtggccacattaaaaataggagtcttggagctgggaaatggctcagtcagtaaagtcacgcttgctgagcatgtgtgaatgcgtgggacccaagttcagatttcaagcatctatgtaaaaagctaagcatggcagtatgtgcttgtaatccaagctcctggggcttcctggccaaccaatccagctaaattagccagctccaggctaggaaaaccatggtggactgcaatagaggaagagaagatgcccaggatccctgtcctctacacacgcacgcgcacgcgcacgcgcacacacacacacgcacgcacacacgcacaccaaaacaaacaagatataccctcacaatgccctgttaggagaaagtgcagctttcctgtgtgtctaagcccttggaacaggccagtaggagatatagggactgagccagagctggcgcatgctgactggggcttgtgaaaaggagcggatgcttcaaaaagtagctaagagtcaagaggcagagagcctcccgggtctggcctgcttgatgcttcaccagtgtggatctctgtggaactgccacacagccactgacaaatttttaatgataattttacaaaagctttctagaagcccagtgatgtgtggtgttcctatttcaagtgttttaaagaactttgcttgtcaaagactctggattgctggcaattttttttttatctctaagcagaactcgagtttttttttgtttttgtttttaaagtaactgtcttgaattgcatttaagataagcataagtccttagagatcatttgtgagaagaaaaatgtcatgtagattgcaagagcagtttctgcagaactccttagaggagagggtggcagcagagcaggcccaggagtaaagtccttcatgatgctgagccaggggagcagtcttgcctaccgacctcttggagctgaccgtgcagacgtgagctgagcagaggggcactgcagtggctggcaccctcccttctttctccctccctccttccaacttgtaactgacagtggctgtaaactcagtttctggcccaggtttttactgtcactgaaggacccagctggtgctgaccgacgacagtgactttgccagtgtttatgaaagcagtaagagtaacagaacatctcacgtgtgcgtgcatgtgtgcgtatgtaaacctatgcatgtggaagccagaggacagcttagttgtccctcaggcctcatctgcgttgttgttgttgttgttgttgttgttgttgttgtgtctgctcactgtcctgaaacatgctggccccgggtcattctggccccgggtcagtggtctgttctcccctgggctggaatgtcaagtcttgtctctacaccttgctttgctagaaggagtgctgggatttgtttgtttggttgattggttggatggttggtgtttgtgggtgttttgcctgcgtgtatgtgcatcacctgtgtgcctgcagagtccatcagatcctgctactgagagcagatcttctggaactgagttacagacagttgagcctccagatgggtgctgggaatcaaatggaagtcctctccacgagcagccaagagcagtcaatgctcctaaccactgagccacctctcaaagaccttaaaaagaagtgctctgtggcatgtgttacagagctgtgctcttcacagcccttctcatgcccacttcttatcaaggctgttcacccatcttgtgctttggcttgctattacagagacaaaccacacctactttgtacagtaggactttgtacaactttcttcattgtgtggtagcaattattctgtaatgatgggtgtggccaacgcagctgatgagctgtggtgacacttgcaccactgtgatgaactgtggtgacacttacaccacttcccttcttcagttgtcacactgaagaacatttaagtggacaagtttccattgtagacaggagaggtacacagtctgtctctgcttgtgtgaggcagtcaccaagagtggccatgttatcttgggctgtggggtttattttgcgtatctttaatttggggccagttctcctttttccattgtgtctgtgtgagccctagccttgctgctgctcgccggcatcctgaatatttgccagtgtgatggccgctcacaggcatcgctcctgttttgtgaaatgaagtttcgtgtttactaacaacatgcaatttcttggactatgtgggttttgtctgttaggtcctgggattgaatctagggccctgtacttgctggggcaggtgttctctcactcagctccagcccccattcagactttacctgtgtgagcctagaaaacaactagtcaggctgaggttccgtctcttggcttggaaagataaatgtccacaattcagagtacagagcacagggaccatgctcacagctcctggttcttattgttgttgttgttgttgttgttgtttttggtggtggtggtggtggtggtggtggtggtggtggttcttcaagaccaggcttctccgggtagctgtggctgtcctggaactagttctgtagatcagtctggctttgaactcacagagatctgcctgcctttgcttcctgagtgctttgctcagttcctaggtctaagcatgccttggtctcgagtcattctgaggggtgctgccacccaatgggagagaccctaattgtctaaagcaacacgagctagaccaagagtttggttggtttgttgggactgaccagaggaggccccagcagagtctcaggagactcatatggacctgtagttcagggtgtggacagaccatggcagctggatacagtggtaagcctactttggtgtcgcaccagcctgatagtacagctgctcacctctgccctcctggataactctccacagagtggtgaggttgttcgttttagttgaagatacagaagcacagctctcacctcaaagaagtaaaaaccatgtgttctggagccagaaccagagtggccatggccctgagcagagagttaggctcctccaaacacatgtgcagcttgataatgctggcttgaaggtttatgggaaccaaataaataaagtcacaaaccaaggaaacattaggtgggcagagcaggaagatctcagccattgaccttagatgccatctgagcattcttagcctttggattacaggaagtttggtgtctatttgtacattccaaggggatttacctcgtagtcacaaaggtgttagccatactcaggtggacaaggagtggcaactaaggggaattacacatagtgtagggtatggcatgggtgctggatggcttttaaggggatgggtcaggacaggggacgggtgagaagggactagagttccaacagcagcagagactacttgtgtgtgcagtggaggggtgctaatggtgcctttatttactaagccttatttcctgaacatagagctaatacagaactctcaggacagtctcatctcgtctccccacccaggaatccctgtccctgagcttatgttctttctccacatatgaaagtcctcagtgtactttggatgaaaaactagaggccctgattcaaatagtggtggctgttgccgtgaggaaatgtgtaggcggacctacacgtgatgatcgttattttgtaagaggttctcttcatcctggttcacatgcatccatcacaatccatcactcttaggcccctttaacttcaatgctttcatattctgtgtttatacgcatcagtttgggctcatgtcacagtgcatagcatgtcacagtgcacatgcacaggtcaggacaactcttaggagttggtctctcttgatgccttgtggggattagactctggtcgtcaggtctttgcactagcatatctgcccgcagagccatctcactgccccaggctcattatttaaaaagccatttatttacctgtctctgctaggagtaggctctgcctgcctctctgctcttgagaacccaccatgggtcagggtgtgtccttcccggtgctctgtcagtcagtcccttaacatctcttaggatgaagcttgcagatccacccaccccctgcctcctgcctggcccaaccccacccacaggctgggctctgcctctggtgctctctccctaatttgttgttaggttttctctggtaggaaagcctggtgtctgagtacttggcaggtggtttctagaactttcctgtgctctccttttctatagatctgtgttccctgtgcctgggatgcacctctccagctctccagtgctggctgcaaaaggcttcctgctggtctctgtgcctgaatgaagattctgccccccccccccttaaaaaaaaaaaaagagttacttccactgaaagtaaggtacatgatcactcactctgtagatttcgtatgtttcctttggggctttttcttggggtagagggcttgttttggtgagtcacacacattagtttatagaatatctgaggccttgaaggagggatatctggttagacagataagaaaggaggtagatcccagtgggtgagacttctgtgtcttctcaggtgagttggtgtcacctggagctgttagagctgaggacttcctgcttgcagctgtgacggagaactggttgcacacacacaggcacacacacacacacacacacacacacacacacacacatgctcacacacccccacccctaagagttccacttgcttagaccatggcaatgatgctttagaaaatgctgcaactgtgactgctgggtactgttaaagcccgactctcccttctcacctgagttggtttttacttcataaagactgaagtgcattttttcacgaagattggatattaataatagagtttgacataccttttaaaaatataatgactctgaagtaaagattagcccagttaatactctagagctcgtaaagacacagattgctaatccctgagcgctgtttacaggtggggtggtagaaagctctggctgtcctgaaactcactatggagatcaggctggcctctgcctcacagagatctgcctgcctctgcctccagagtgctgggattaaaggaatgagccactgtacctggcagatgaaaatatttttctgaagagcaaaatttgagtttatccaggtgaaaacttaggtgataaaatcattcaaaattcaaggtcagcaagtggctgtgttttccagattacacacagagaaagcagtggttatcagttattggcaccatggaataaactatcctgtggcttaaaagcagcagtgattcgtccttgcttatgactctagtttggctaggccccgccaaacagctctgctctctgtggcatctgctgaatgttggggtggagctccgtccaggctgctctgctgaggctgggcgcagacagtagctccactcataggtcactgcagcatgctggcggggtcaactgggtgcttagctatatggacccaaggagaggaaacggaaacagccaggctttgtgagggtgaagcccagaactgacatcgcactggcaatgaataggcttcatgccagtctattgtttggagcaaatagaaggccctcggcttgtgcagacagagtaggggcgggggacagggagtgcgggcacgcatgtttggtcactaacatagccagggacagaagaatagaaatatagacccacaactcctggagtatgcgtgtagctgtgtagaaactactaggggttgtgggcaagttttccatcaggtaaagcctgaggctcttgtatctgcccctggtgacggagtttttctttattctgtcaaacatctctggaggcttatagagttgaaaggagctcatccagttcactgttaatctggagaatttgggatcatccataagtaggagataaaaatagcacaggctgtttttattatagcaagatttgatgcacgctaatgttcttatcttcaacaaaaaattaatgacttcaaactgaaaccgattcagctgacttcttttactctttccacttaagctctgctcgaaagcctactgggttggcgccaggagacagtgagtgttcccaccctgttcacattgaccttctgcaagtgtctgatgatagaattgtgattgtgggagcttctccatgcctgtgctgtgtacaccctgagagtccatgaataattagtcttctccacctctagaaactcaggctgtttctaactctgcccgctgctcctctttgaggcgcagatagactgtgacgggtggcattatgagatgggccttttaactatggctcagttaaagtggcctgaaagtaaattccaagaagaaaaattttaatattttttaagttacttagtgtatgtgttagggtagcaagttcctgtgtggaaacagcctgcctgagctggctctccttccactgtgtgggttcttggcacagttcagatggtcagtcttggtggcatacccttctcctattgagacatcctactggcataacttttcattcttcttcttttttttttttttttttgcagctttattttatgtgtgtacatgtatgtctgtacaccacatagtccctggtgtcaggagagagagtagcagatctccctagaactggggtctctgatggttgctggccactgtggggatgccaggaagctaacccggtcctctacaagagctacaagtgctcttacatacctagtcagctctccagctcataactattcttaaaaatatttgcttgaaagtgttttttgttttgtgattttgtttgtttgttattaataactttattggtgctgacaagctggaaggtgccgtttttattagtgtttggtcatcggcagggttgccaatttttcctgttggtctagttttaaaacagatttcttcctcaatccccactaagttacctttgaaaatatattttcctcagcaatgttcagcatagagccccgaggcaggctcgaaggctgatctctggactgaattgctcctatctggcgcacaggggtgggtggagtagcagctccctttctgtctcatacaccaaggctgcgtctgttcctaggcttctggctttgctggaacacgttctcagggccatgctgagctccaggctctctctataaagcacaaaggctgggaagatgggtggatatcctgagtttcacagtcccctggggccgtatttctgtttagagctgacaattgtcagtgggaggccctgaaacactgttcctctgtgcttccagaaggttcctggaagcaacttcgagaaaggcagcagtcagcctgaggaggacagcgggtggagcgggagaccttggccgctgcttaagcctctctggcaccctcccctccgccccggcctggggagccacatgcttctctttgttctctccatgaaatgaaatcctttaggctttgagacaacattcactatggcctgcagacccagccccttcagccagtcgctcccctccttggactgaaatcacaagttgtgtgagagactccgaccagcagccatagactgatgcggtcacgggaagacctagcaaggccagagcactcccatccctaggttttcagccaaacctcagggctggaacgttaaagcatgggctatggctttgctaatgtttgaaaaatgcttcctcacccggatgggtgggagaggatctgcataggaaattctttccttcatacataataaattgtcactgaatttaaataactcacagtcacaagggatgctagtaaaaccattacactttatagcaactgtcagcccagtccctgcatggctctgagctaggtgaacctggaagaagagattcactcccacagcccttacttgtgtgcacagagaaagtgtgggaagtgagccacaaaagaagagtactgtcactggcgcttccagcgtggcgggagcctctggtgggttggttcctgtcctgtgggtaggcagactgacaggcagaatggtgatgcagctgtagcagagaagattctctcaggcacaagctagccgtgaggtcttgctggagcatccagagggcacctgagcctgctgcccaacacccagtacacagcaatcaggggctggacctgcaggacaagggaatgaagaaatgacacccagccagacacagcgaaacagaaaagctgacatgggcagatctggactctcagatggagaagctgcagagtgtctattgtgtacagttgaacagagaggttattggtacagattataaggggcaggtttagctaatatcagtaggagccaactctataggggagcagtgttcaggcagtcttcatgcggataggagaagctttggtgaaaattctctgtacacactttaacatccacacatggatccagggagaagggtttgccatctctacaagcctagcctgggcttgaggtaccccagagaaaaccagagataggtattaaggcctggtgaggggagcgcaacacattgtttatgtagctatggttaaaaggataaaatatgaagtattagaggtatttgataacaaatgcacataaattatttaactgtcatctttatattttctaccagagacatataagatgcttctgagaaggacagcagctgatgttgaaatggtcctgggacacagggacaccagtggcccactcaatcccagagcagccctaggtagctcattcctcagatgagcagatatgctcagacctggtagaaggtttgagaaagatgcacagatagatgctaggcagcagtagagtgtgcacactcatgcactgactcccactggtgcaatgttctgagaaaggaaggggagaggtcaggttactgtgctgggctctgccacactcgggtctcaggagacttctcgccatgtcccattgtgactctacatgtattgtccttgacacttagacctgtgctcctggtagacttagaaacagattctagacttcctttagctcttaactaaagagccgaaggaggttgggggcggaaattagtagtagagcattgccagagtgtgtgagggagggcctgggtcccaccctgagctccaccaaagcaaacgccagtaagtatttggatttgtgcaggagtgtacatgagttagtgtttagagactacagatttgctacccatcagcgatggacacatatgcaaagggcagaactgaaggttttatttatgaacatgctggttcatgaatgtcacttggtcttatgatttaaaacatgcctgctcttccaagtcttcgtcccaggtttcatagactccacctgtctcagtccctagatcggaagcgcaggaagctcacggatcttgaagtcagtggggaatttggcttcatacacaggtggcaagctcttcttggtgcttttgcttccctggctgctggcagggcctgaatggaaggagcttaggcaggtaacttaacctaaagagacagccagttcacactaagcagctggactgttagtgccaaacggcctgtggttaggggcagctccacttggcacatttttaatgggaacaaaaggctccaagtggtgagctgagatgcagtcttgagagtgtgtagacatgacctcatcgcatagcttggccatgaagtagggaaggtgaggtgtcatcaccaggctgcaggtgaggtggggaatgcttcatgtctgagctctgctgctttcctacccgggaatcccaggtggtgaaccttggtcccgccactgtttcccagcctgcttcttcagctctcactccagcccctcctctttgtagtggttcccagacctccgtcagttcatcttgcttcctttgacctgcagtctgtccactcccaggtctggccgtgactttctggtgtgtcctgtctcagttgtcaaacagccaggaacagaacatcatttaatggtagatggttgcgtggttctaggccctgtggagtgggtggatgaagctatgagggatgtggggtccagactctgacagagttcttacaagtcttcctcccccaccagatagagtttctctctgtagctctggctggcctggaacttgctctgtagaccaggctagcctggagatccacctgcctcccaagtgctgggattaccccaccatgcccagctgttttctcccagtctatctgtttatttatttatttatttattttggtttttcgagacagggtttctctgtatagccctggctgaactcactttgtagaccaggctggcctcgaactcagaagtccgcctccctctgcctcctgagtgctgggattaccccaccatgcccagctgttttctcccagtctatctgtttgtttatttatttatttatttattttggtttttcgagacagggtttctctgtatagccctggctgaactcactttgtagaccaggctggcctcgaactcagaagtccgcctccctctgcctcctgagtgctgggattaaaggcgtgcaccaccacgcctggctcctctcccagtcttaaggaagtggactgggataaatggccaggtgtcatcaggcctggccaggaacagtgagggtagtacttctctgttctgcagctagactgactactactaaccagccctccatgtcccctactgcctaccattctcaccaaaacctaccccctctcagtgcttcttctcttagctgcctggccatgtcaccttctgcttccttcatctctgccccagagtgcctgaagctctgcaccccgtgttgcccccagcttcatcttcagattatgtgtgtctgtgtttgaaagttcccttgatattacaaataggcaaagccagtgatagcccaaccctaggtgggggttccctgtcctattacatgcgcctgggtgttgccgctaccctcctggtgtgctccacctacagctcctttctgtctagcccatcagccctgagtaactgtctccacttggatgggctttccaccttttccaagtacatctgtccttgaaaggatctatgctttccctgggtagacgggaaccatcttttcaattcacggtaatgtcactgccctctcctgttgtgtgttcattctgcaaacacttttaggggacagagctgtatggatgtggacagagctccaggggcttcatgacgactgtcttgggcaactccttaactgctgcagatagcagaggacgttgtcaacaggaggcattcagtaaatgtctcataaatgtgcccatccatgcatttccagggatcccagagttagcacagaggtgaactgggatctccttctctaaggtaacctgtcttcgtagcttcagtctggatccaccaagccagtcactaaagttcctccctccctcccttcgtttcttcattccttcctgtgagtgctctgtctgcatgtatacctgcatgcccgaagaaggcatcagaccccactatagatagttgtgagctaccacgtgtttgctgagaattgaattcaggacctctgaaagaacagccagtgtgttatctccccagccccatcactgaagttctttaaagagcctgagtctctttcaggccaactatcagagaccccgaacattcttgacacaagctcttatgtcaaggtccatggtgtaatatgtgcctatgatcccaacggccatctcagcacctgatagggccccagcagccacaaagaggaggcacaggtggctttgtggtagtgaagaagatgatgatgacgacgacgatgacgatggtgacattccttgcttccttcctaggagatggctggcagagcgctcaagcagacgggcagtaggagtatcgaagctgccttggagtacatcagtaagatgggctacctggaccccaggaatgagcagattgtgcgagtcatcaagcagacctccccaggtgaggctactatacagtgtgtcataggaaaaggcttgtggtctgagagcaggagacctgcacaaagaaccagacctagtcaaccctggaatttaacctaggtgctcacatgccccgcccccatccctttacagcagcctgtgttactgtctagagagttcgtgtgtctgctgaatatttccatctttcagggaaaaaaagagttaagagttgaaattttaaaaatcttttattgggcttaaggtctttgaaaagagaggcttatcaattccaaaatcacattttttttttctcacattcagtagcaggcagctctcaaggcctgcagctgtgagcagtgtgtcagctttggaagggacaggttgtgatggtcctctccagagatggagtagatgctctgtggttcctggggcatgatgatgggtttatgtactccctgctccgtggaagccctgcaggaaaggcttcccgtggtaaacgaggacattgtaagggcttcccaagggtttgcgttgtggtgggggctgcacagttctggtttcctgagacaagaaattccctcaccagctcctagctggttcaggagtctgtcctgagaatggtgctgcagggaacaggcccagctccgtagccactgtctgccttcttgtttttggtgtgttgtgctggccacatttgctcagcccaggcaacacaaagccctccatcagctgtaactcctgttcagtgccaaggttgttgggtaatttctgtcaggtgtgtgttagcggtggggtggggtggggcggggcttatccctacgagtggataagaccccgccctttggacttgaggattcagggccagatctagcagagcggaggagtctgtaggagatgaaaggagcctttgttctttctaggcagctgctttaaatgaggagtttcaaaatggagaagtcgggataaggaagcagcagccgtctgtgtgtctgggtgttggtcaagagagggactctttgtagatttttttaaaaaggaatttaaaaaatattttaattttgtttttaatgggaacagtgcacttgattgcaaatattttgcaggggcagaattccccctaaggctggagtcccaggcagttgggagctttctgacgtggatgctgggaaccaaactcaggttctctgcacttttaccttccggagccatttctccatctcctctccatcattctgttctcacttaatgttgggtatagatcactttgtccttaaagaaagaaactgccaggcagtggtggcgcatgcctttaatcccagcacttgggaggcagaggcagaggcagaggcagaggcagaggtagaggcagaggcagaggcagaggcagaggcagaggcaggtggatttctgagttccaggacagctagggctacacagagaaaccctgtctcgaaaaactcaaataaataaataaaataaaataaaataaaattaaaagaaagaaacccaacagagccttaatttggaaaataaatgaaaggaaaatgaatatttggacagtgagtacagttctgccctttgttaggaaaagtagactttctaaacatgacactacggggcctagcaaacacagaagtggatgatcacagtcagctattggatgggtcacacggtccctaatggaggagctagagaaattacccaaggagctaaagggaactgcaaccctataggtggaacaacaatatgaactaaccagtacccgtgagctcttgtctttagctgcatatgtatcaaaagatggcctagtcggccatcattgcaaagagaggcccattggacttgcaaactttatatgccccagtacaggggaacgccagggccaaaaagggggagtgggtgggtaggggattgggggggtgggtatgggggacctttgggatagcattgaaaatgtaaacgaggaaaatacctaattaaaaacaaaaaaaacaaaaaaaaaaaaacatgacagtaagtagacttggctcctcccaaataactgcatgtcatggagaaaaccgtgttggctgtccaggtagtcccttagcatggctgagcctgaccttaggagccaagtcgtttaaggcactgtaccccctctggcccatacatagccttcccatttgctctttgaccttcagccccatgacccattttcccctaccttgtgtgccactttagtgtgacaagtttctgctggtactggacataccctgccgggaatcttgagaagaccttgtatatttgccgagccccaaagatgaggctactctgggaatcaacctgcaagtagcagcccaccatgtgctctgaggctgacttctcactctttcctctctaggaaagggcctggcgcccaccccggtgactcggcggcccagtttcgagggcacaggggaagcactcccatcctaccaccagctgggtggtgcaaactacgagggccccgccgcactggaggagatgccgcggcaatatttagactttctcttccctggagccggagccggcacccacggtgcccaggctcaccagcatcctcccaaagggtacagcacagcagtagagccaagtgcgcactttccgggcacacactatggtcgtggtcatctactatcggagcagcctgggtatggggtgcagcgcagttcctccttccagaacaagacgccaccagatgcctattccagcatggccaaggcccagggtggccctcccgccagcctcacctttcctgcccatgctgggctgtacactgcctcgcaccacaagccggcggctaccccacctggggcccacccattacatgtgttgggcacccggggtcccacgtttactggcgaaagctctgcacaggctgtgctggcaccgtccaggaacagcctcaatgctgacttgtacgagctgggctccacggtgccctggtctgcagctccactggcacgccgcgactcgctgcagaagcagggtctagaagcctcgcggccgcatgtggcttttcgggctggccccagcaggaccaactccttcaacaacccacaacctgagccctcactgcccgcccccaacacggtcaccgccgtgacggccgcacacatccttcaccctgtgaagagcgtgcgtgtgctgcggcccgagccccagacagccgtggggccctcgcaccccgcctgggtggctgcgcccacagcacctgccactgagagcctggagacgaaggagggcagcgcaggcccacacccgctggatgtggactatggcggctccgagcgcaggtgcccaccgcctccgtacccaaagcacttgctgctgcccagtaagtctgagcagtacagcgtggacctggacagcctgtgcaccagtgtgcagcagagtctgcgagggggcactgagcaagacaggagtgacaagagccacaaaggtgcgaagggagacaaagctggcagagacaaaaagcagattcagacctccccggtgcctgtccgcaagaatagcagagatgaagagaagagagagtctcgcatcaagagttactccccttatgccttcaaattcttcatggagcaacacgtggagaatgtcatcaaaacctaccagcagaaggtcagccggaggctacagctggagcaggaaatggccaaagtaatttctcacccccttcttactgcgttcccagctcccctttcctatgtagcagccaccgtcagcacgcacccatctcagacacggggtgaagccaagctgcagtgcgtggccccccttcttcttcccccaccctcagatgaggaccctgctaacaagtcaatcagcactcgtactgatcagtgtgctgtgtccttactcgtggagaaagcacatccaggatgggcttctgtgaacattctggaaggatgaagaatgttgtcatagtgagatatgttagagaaatacacagtatcattggctcagtaatccaaattagtgaatagtggtttgggttagcctctgtgagacagtgtctcatccgcagcccccactgaatgggtctcccagtcctgccagcgttgtgggtgttcccagtacctacctctggatgtagctgttattttgggttgttttgttttgtttgcttttggtactgtttttttttttcatccttgcactgtgtgtgttgttttgttttattttagattttttttttcacgtgtgtgagtattttgcctgcgtgtttgtctgtacacttacgtttgtgcctgtgaaggccagaggaaggcattgggtcccctgggacagaagtcacaggcagtggagctgccatgtgagttctgaggatggaactagatgctctggaagagcagccagtgctcccaaccacagagccagctctccagccctagtagatgttctcagtgttccggagttgacactataaagtactatagatggtgctttttaatcacattttaaatatacatcacagtaattttacatcacataaattagtcatttcagagtctaggacttaagtttgtgttctcatttcctgttggcccggagtcattgcttgttttctgttttcctattttctttgaactactgaaatactaactagattatggattctagaaatgttttccacaggactttttttttcttctggttatcagatagtcttttattgaaatattttcttgttgcttcttaactagctgggcactccactgcaccactgttgatgtcatctatgatgtcatgagggtggcggccatccatattgcagcccacagactgtgcagtacccaggatctccttgatagttccagaaagttctctagccaaagaccggtgtctcatctgccgggcaatgttgacaatctcatcaaaagtaatgttcccactgtgtttaactgcagaaagaaagcacagggccttttacagcttcccctgtcttctgagatcatggttccattttacctatcgctaggctgttcccacgctttcggcacagagccatccacatgtaggacagccctgtttcctaaaagctgggctcactgtcagctcaccactggattgcaccagccaacaatactggtcaggtgcagtggcgggtggctggactttttttttttttttttttttttaagtagtagtggttttccttgccttttagaatgtaaatcaactagaaaaagacttttctttggatttcatatttgcacgtatgtagatgaatgttccatatagaggtagatgtcgccatccttatgtagagactgaggctgtctggtgtttcttgtgtagcctggtagacctagtctcttccttctgaagggtcctcactgcttgaaggcagccccgccccatgcactcggctgctgtggggtccctgtaacaggcctttgattttccttgtgtacaggctgggctctgtgaggccgagcaggagcagatgaggaagatcctctaccagaaggagtctaactacaaccggctgaagagggccaagatggacaagtccatgtttgtgaaaatcaagactctaggcatcggtgcctttggggaagtgtgcctcgcttgtaagctggacactcacgctctgtacgccatgaagactctcaggaagaaggatgtcctgaaccggaatcaagtggcccatgtcaaggctgagagggacatcctggctgaagcagacaatgagtgggtggtcaaactctactactccttccaggacaaggacagcctgtactttgtgatggactacataccaggcggggatatgatgagcctgctgatcaggatggaggtcttccctgagcacctggcccgcttctacattgcagagttgaccctggccattgaaagtgtccacaagatgggctttatccaccgggacatcaagcctgacaacatactcatcgacctggatggtcatattaagctgacagattttggcctctgcactggattcaggtggactcacaattccaagtactaccagaaaggtacagcttcagacctactgtgtgcacctcctatacacacacacacacacacacacacacacacacacacacacactttgttattgtaacttggtggggcatacttccttttgtaaaggaatgggagagcatgcatgaggccagttgctttgttagtggactttcttactgtattttcttgaccgctaaaggctttgattaaaaaaaaaaaaaaatcaccacactgccctattaaaaaaaactttgagccgggcgtggtggcgcatgcctttaatcctagcactcaggaggcagaggcaagtggatttctgagttccaggccagcctggtctacagagtgagttccaggacagccagggctacacagagaaaccctgtctcgaaccccccccccccaaaaaaaaagaaactttgaaaaataaatctcagagttcctggagtcgttgctcagtaaacgatacttgaccgccatggagagggcctggggtcgtcagtggaggggaatgtgtgctgacaggaattggccagaatcatgtttctgtttgaagctatggcttcgcttcagtgttgaattcatgctcttttctgtcattcccccttctccccggtaaagggaaccacatgagacaggacagcatggagcccggtgacctctgggacgatgtttccaactgtcgctgtggagacaggttaaagaccctggagcagagggcgcagaagcagcaccagaggtgcctggcacattctcttgtcgggacaccaaattacatcgctccggaggtgcttctccgcaaaggtatgccagcccaccgccctcctcggctcactgcccagttgtaagtcaatgtgtgttactacatgtttgcacctgcctgtgagcttaaggtttccctagcaacaaggctccaacctcttacttctgagctggaatggcctttgcttcaccaggattaacccaatatttcctcaccctgtacccgggaaccttgggctttttatctcagatccaagggaatgactctcacgctaactggctttttcagggtcagctaggggctagaaagatggctcactgggtgcctgtgcataagacacaggtttaatttccgtcagggaacacctacatcgttgttcgtaactgtctaactccagttccaggggatacagtgcactcttctggcatcgacaggcactgcatgcacacagtgcacaaacagacatgttagtaaaacacccataaaaatatattaattaacttaaaaaaagtacagagtgaggtgatagaactgtttgggctgtagggccactgccgtccctggccacagttttcaagctctgctgacctctcccttgtccgggctgggttactccatgtctggcacacaaactaattctccctgttgggcccaaaaaacctaatgggcattagattactacttgttggtgaaattggtttcctggataggtggttggacacaccatctgtttccgaactataggaacctcactcaggggggtctttgtggtctgtagtgacagtgggtgtcagcttaaccttggggttaatccagacatagacagtcttttgtttatattgtactcatgtctttagacctagtccaacctggttcagagtgagatttttcatcagcatggtggtctgatacaggttattgatcctctcagcttgtgtgcacaaaggtgtctcctgaaagcttataaatgctaattctggtgcctagtagttctgtagcctggggttgttctgcagtgctaggaggggctgatgaagacagagtccaaagctttaaccagctgcttctattcgaggttgctaacaagtggctgaagagtaggcccagaaggaagggtgggagggagagcatcagtggtcagtgcagctttcctcagcctcctgtagacagcctgatcaccacagctgggagtccactgccacagggcaggggctgcctaccgtttgtttatttttgtttttgagacagagtttctacctagtctccatgttcttcagcatcattttaaactgatttgtaaactttcctgtgaagccatctgctttttgcacctgccacataaccaggagtagagctttgcccaacctgagttcaatccctgattcatccatatggtgggaagaaagaacaactcccacaaatggtcccttggcccccaacatatgccacagcacacacgcccactcaaagtcatatgaaactctagctgctaagtcctgtcttcttacttactctaaaagcatcctgtgtttatgaagaccagtgattaaaaataagaaagcccacgtgtctgttgcctgtggtatctgttagcaccttgtgtgagcccattggagccgccattggagcccctgcctgagagcgtgcttttagtagcacagggctgcctctgagctttctcactccgtcctcccaggatctgagggagccgctctgagtgacgagagcgctgtctttcagggtacacgcagctctgtgactggtggagcgtcggtgtgattctctttgagatgctggttgggcagccgcctttcttggcccccacccccacagagacgcagctgaaggtaagcggcacagcgtgtcagtgtgtgtgtgtgtccagatgatccgtgtgcctttccagagccctcggacagtttcggacctcttgcaacacatagactagagatggcggttatttattgtggggttttccaaagagtctttatttttactatacttttgaatttttgataagaaggcaacaaagctagacatgagttttattatatttgaacacctgtaattttatgtaaaccacttgtggctctctctcgccctcttgttatttccaagcaagaataacacgcagtgagatgcagcggcagctgccgtcagccccctgcctcgctcgcctgccctgcagagcaccatcatccctgtggctgtaatgaccagctcggtggtcaggctcaggctagctgtgtgcattcccaggactcacggaaagcaaccggatctatcagccagcccctaagcggctcattctaggttcacagccactgcttcccgagtgtgtgactccttattcagagttgagctgaaatcggaactctttggttagtggatttatagaagcacagtcctagggaggttttttgtttttgttttttaatccagattagtctatggtagagcataagaaactttgaaacagtcggttggtggtggtgctcacctttaatcacagcacctaggaggtagaggcagatggatctctgagttcaaggccaccctggcctaaagagcaagttctaggacagccagggctatacagagaaactattctggggggaaaaaaaaaagaaattttgggctggtgagatggctcagtgggtaagagcacccgactgctcttccaaaggtccgaagttcaaatcccagcaaccacatggtggctcacaaccacccgtaatgagatctgatgccctcttctggtgcgtctgaagacagctacagtgtacttacatataataaaataaataaatctttaaaaaaaaaaaaaaaaaaagaaattttgagtaaaaactcagttcaactcaatgatacaattagtttttgcgttttctgcttactaggtaaattgctgaaccactcactattatacctgcataatagtaagccagattattttttattgtggtaaaatagatgtgacatgaaatttacattcaattattttgaagtgtatgatctgttgccttaagtgtgttctcatagggctacacaaaccatttctgggtgttctcatctcacccattaaacaactgctccattgctctccccggccgcttgtgccctatctcagaagtcaactgggtgcctcccagatgtgcagttgggttcttatctaacttacccgccgcctttcacttagcacgatgtccgcaaggttcatcctgctgtgtgtggatttccttcctcttgagactgaatggcagctttttcaagctgggccccgtggtttgatgatcgttcctgggttagtgggtgtctggatgtctcctgccctttggtgactgtgtagtgctgctgtgcacctcttactagtgtgcctctgcctcggcctcctgagtgctgggactgcagacccacatcaccatcggcgggcccctcccgctttggaatagccgttatcctcaggcgagggtgtgctgtagggcaccactgagcatgtgttcttattctcatgtgctgtttgtgtgcttttaaaaattcagatcgggctggtgagatggctcagtgggtaagagcacccgactgctcttccgaaggtccagagttcaaatcccagcaaccacatggtggctcacaaccatccctaacgagatctgacgccctcttctggtgtgtctgaagacagctacagtgtatttacatataataaataaataaatattaaaaaaaaattcagatcatttgttggagttctcgatgcactctagatgttaagtccttcacaggcgtatgctttgcagacccagtctgttttatgggtagccgcttccctcttagtaacttgagttaatgaagtgccagttgtatacccctgactgacctcgaactcacatggttaccaccatacatggcacggcagtttataatttccatgaaatccagtgtactctttctttcctgctggtgtcttggtattcaggaagacctttgtcacattgtatagttttacccctctaaaacatttactgtaggtcaaaccctcattcagcagtcagttatactctctagttccacactgggcctaagcctgaacaacgcagacaaccttaggtttttcttcacagtatacgtggcttcatgacagatatttttaatgaccatccagatgggttcaaggccaactggggtcagttactgaaaagaaaagaaaaatcccaggcgactccctagcctcagtaaataccgaattgtgcgctgtggtggcccaacaaaaacccattgccatagctgaagctatgagaggctcacacttgttatagctgaggtcgaggctgtgcaggctcaagacttagatcgatggggtgctaacagtggttctgctgcccacaggtgatcaactgggagagcacgctgcatatccctacgcaggtgaggctcagcgctgaggcccgagacctcatcacgaagctgtgctgcgcggctgactgccgcctgggcagggatggggcagatgacctcaaggcacacccgttcttcaacaccatcgacttttcccgtgacatccgaaagcagcctgcaccctacgtccccaccatcagccaccccatggacacctccaattttgacccggtggatgaagaaagcccctggcacgaggccagcggagagagcgccaaggcctgggacacgctggcctcccccagcagcaagcatccagagcacgccttctatgagttcaccttccgcaggttcttcgatgacaacggctatcccttccggtgcccgaagccctcagagcccgcagagagtgcagacccaggggatgcggacttggaaggtgcggccgagggctgccagccggtgtacgtgtaagcctcagttaaccacaactcgaggaaacccaaaatgagatttcttttcagaagacaaactcaagcttaggaatccttcatttttagttctggtaaatgggcaacaggaagagtcaacatgatttcaaattagccctctgaggaccttcactgcattaaaacagtatttttaaaaaattagtacagtatggaaagagcacttattttgtggatacccatctttttcttactaaattataaggactgactgtgagaaaccatgctgctgttatttccatgtgtgttgtatctgatagcacttgtccacagctagaaaaggaagagctggagagcgtgaggcaagacgtctgtgcaataagagaggatgaggcgacggagctctgctcaagtcacgaggaccgcttatctacacagtggcttagttttgtattttcccacatttcaaattgtgatgtaatgtttgaaagctgcttttgtattttctcctttgcatattatagttcctagaaagagtgagcagagagctggtgggtgtgactccggtgtctggtgtggagagtactgcatgagcaggggtttctagtataaaataccgtatcttgccattcacagcaggtcctgtgaatacgtttttaaatgaggtattctagacagtgtgctgataatgtattgtgtggatgtgtgttaaagaaatgcatatgtataactgaagtgtgatttttttttaatgtgtgtgtgtcttggatatgactgagttcttcgggaggcaaatgtaaacatttgtcatatataaaacacatcaaaagggattaagtcagctttgccaaaacattgacataattctagcgttttgtccatttccgtagtcctgtctgctgtcaggtgtggctgtgggagctggaccctgctattcattctttcactcacagggttcccgcagccataggtgatgtaagggtcctgcttcctgtgttctcagccaaccaggaggttctgtgaaacccagttctttgggcctctttcacatgagaggtgtctgtcacatctcaatgtgacttaatacgtttttctaactttgtaaaaagaaaaaaagattctttgaagcaacattggagtacaaaaacaagccatacttttttcttagacatataggtgtgtatataactatagataaacacacaaaatagtccttatttcaaattagtacgcttcctacttaaggtgatttatatttgagtacattcagtttcttttgcttttcaaggatggaacacatcccattttcattatgctatgccaaatcttctcaccaaggttcttagcacagtgcacccgttacttagtattatctaggcagaaacacttacaaatttatctatgtctaagaaacattcctgtgtctggtttacatttgtatgaatggcatattctgaagtctgctgtgcttgtattgtgacttacagtattctcgctattttgtagtaatgccgtgttatttacagcgctctgacatagtttgatgtggtaggttctttctcaggaactcaatttaactattatttattgatatatcattgcctttgaaagcttctactggcacaatttattattaaaactttaaagcctagtctcttca

SEQ ID NO: 175 - DNA, 5182 bp, Mus musculus
gtagcgaatgtcccgctcgggtctgcgcttcggaaccgcggcgtgagcgccccgggaagatggagccgccgccgccagcgccgccgccgcttccccgggctcccccgaccctccggggtcagcaaccactgccgccaccggcgcccggtctcccggcgcgcgaggtcccggagccgcgggccaggacgccgccgagggtgtagagcgctcccggagagagtgatggtcttcaaaatgaaaactctggaaaattttaggttctctttaggaactacaaaaattgaaggacagcaattttttgaaaggaagttgttctgaaagcatgtttacaattcactgacactgttgactgttctctttaaaataataagacgctttgagaagattgtatttatggtaaaaggaaactggactaacaatgaggccaaagacttttcctgccacaacttactctggaaatagccggcagcgattgcaagagattcgagaggggctgaagcagccatccaaggcttccacccaggggctgctggtgggaccaaacagtgacacttccctggatgccaaagtcctggggagcaaagatgcctccaggcagcagcaaatgagagccaccccgaagtttggaccttatcaaaaagctctcagggaaatccgatattccctcctgccttttgccaacgagtcaggcacttcggcagctgcagaggtgaaccggcagatgcttcaggagttggtgaatgcgggatgtgaccaggagatggctggcagagcgctcaagcagacgggcagtaggagtatcgaagctgccttggagtacatcagtaagatgggctacctggaccccaggaatgagcagattgtgcgagtcatcaagcagacctccccaggaaagggcctggcgcccaccccggtgactcggcggcccagtttcgagggcacaggggaagcactcccatcctaccaccagctgggtggtgcaaactacgagggccccgccgcactggaggagatgccgcggcaatatttagactttctcttccctggagccggagccggcacccacggtgcccaggctcaccagcatcctcccaaagggtacagcacagcagtagagccaagtgcgcactttccgggcacacactatggtcgtggtcatctactatcggagcagcctgggtatggggtgcagcgcagttcctccttccagaacaagacgccaccagatgcctattccagcatggccaaggcccagggtggccctcccgccagcctcacctttcctgcccatgctgggctgtacactgcctcgcaccacaagccggcggctaccccacctggggcccacccattacatgtgttgggcacccggggtcccacgtttactggcgaaagctctgcacaggctgtgctggcaccgtccaggaacagcctcaatgctgacttgtacgagctgggctccacggtgccctggtctgcagctccactggcacgccgcgactcgctgcagaagcagggtctagaagcctcgcggccgcatgtggcttttcgggctggccccagcaggaccaactccttcaacaacccacaacctgagccctcactgcccgcccccaacacggtcaccgccgtgacggccgcacacatccttcaccctgtgaagagcgtgcgtgtgctgcggcccgagccccagacagccgtggggccctcgcaccccgcctgggtggctgcgcccacagcacctgccactgagagcctggagacgaaggagggcagcgcaggcccacacccgctggatgtggactatggcggctccgagcgcaggtgcccaccgcctccgtacccaaagcacttgctgctgcccagtaagtctgagcagtacagcgtggacctggacagcctgtgcaccagtgtgcagcagagtctgcgagggggcactgagcaagacaggagtgacaagagccacaaaggtgcgaagggagacaaagctggcagagacaaaaagcagattcagacctccccggtgcctgtccgcaagaatagcagagatgaagagaagagagagtctcgcatcaagagttactccccttatgccttcaaattcttcatggagcaacacgtggagaatgtcatcaaaacctaccagcagaaggtcagccggaggctacagctggagcaggaaatggccaaagctgggctctgtgaggccgagcaggagcagatgaggaagatcctctaccagaaggagtctaactacaaccggctgaagagggccaagatggacaagtccatgtttgtgaaaatcaagactctaggcatcggtgcctttggggaagtgtgcctcgcttgtaagctggacactcacgctctgtacgccatgaagactctcaggaagaaggatgtcctgaaccggaatcaagtggcccatgtcaaggctgagagggacatcctggctgaagcagacaatgagtgggtggtcaaactctactactccttccaggacaaggacagcctgtactttgtgatggactacataccaggcggggatatgatgagcctgctgatcaggatggaggtcttccctgagcacctggcccgcttctacattgcagagttgaccctggccattgaaagtgtccacaagatgggctttatccaccgggacatcaagcctgacaacatactcatcgacctggatggtcatattaagctgacagattttggcctctgcactggattcaggtggactcacaattccaagtactaccagaaagggaaccacatgagacaggacagcatggagcccggtgacctctgggacgatgtttccaactgtcgctgtggagacaggttaaagaccctggagcagagggcgcagaagcagcaccagaggtgcctggcacattctcttgtcgggacaccaaattacatcgctccggaggtgcttctccgcaaagggtacacgcagctctgtgactggtggagcgtcggtgtgattctctttgagatgctggttgggcagccgcctttcttggcccccacccccacagagacgcagctgaaggtgatcaactgggagagcacgctgcatatccctacgcaggtgaggctcagcgctgaggcccgagacctcatcacgaagctgtgctgcgcggctgactgccgcctgggcagggatggggcagatgacctcaaggcacacccgttcttcaacaccatcgacttttcccgtgacatccgaaagcagcctgcaccctacgtccccaccatcagccaccccatggacacctccaattttgacccggtggatgaagaaagcccctggcacgaggccagcggagagagcgccaaggcctgggacacgctggcctcccccagcagcaagcatccagagcacgccttctatgagttcaccttccgcaggttcttcgatgacaacggctatcccttccggtgcccgaagccctcagagcccgcagagagtgcagacccaggggatgcggacttggaaggtgcggccgagggctgccagccggtgtacgtgtaagcctcagttaaccacaactcgaggaaacccaaaatgagatttcttttcagaagacaaactcaagcttaggaatccttcatttttagttctggtaaatgggcaacaggaagagtcaacatgatttcaaattagccctctgaggaccttcactgcattaaaacagtatttttaaaaaattagtacagtatggaaagagcacttattttgtggatacccatctttttcttactaaattataaggactgactgtgagaaaccatgctgctgttatttccatgtgtgttgtatctgatagcacttgtccacagctagaaaaggaagagctggagagcgtgaggcaagacgtctgtgcaataagagaggatgaggcgacggagctctgctcaagtcacgaggaccgcttatctacacagtggcttagttttgtattttcccacatttcaaattgtgatgtaatgtttgaaagctgcttttgtattttctcctttgcatattatagttcctagaaagagtgagcagagagctggtgggtgtgactccggtgtctggtgtggagagtactgcatgagcaggggtttctagtataaaataccgtatcttgccattcacagcaggtcctgtgaatacgtttttaaatgaggtattctagacagtgtgctgataatgtattgtgtggatgtgtgttaaagaaatgcatatgtataactgaagtgtgatttttttttaatgtgtgtgtgtcttggatatgactgagttcttcgggaggcaaatgtaaacatttgtcatatataaaacacatcaaaagggattaagtcagctttgccaaaacattgacataattctagcgttttgtccatttccgtagtcctgtctgctgtcaggtgtggctgtgggagctggaccctgctattcattctttcactcacagggttcccgcagccataggtgatgtaagggtcctgcttcctgtgttctcagccaaccaggaggttctgtgaaacccagttctttgggcctctttcacatgagaggtgtctgtcacatctcaatgtgacttaatacgtttttctaactttgtaaaaagaaaaaaagattctttgaagcaacattggagtacaaaaacaagccatacttttttcttagacatataggtgtgtatataactatagataaacacacaaaatagtccttatttcaaattagtacgcttcctacttaaggtgatttatatttgagtacattcagtttcttttgcttttcaaggatggaacacatcccattttcattatgctatgccaaatcttctcaccaaggttcttagcacagtgcacccgttacttagtattatctaggcagaaacacttacaaatttatctatgtctaagaaacattcctgtgtctggtttacatttgtatgaatggcatattctgaagtctgctgtgcttgtattgtgacttacagtattctcgctattttgtagtaatgccgtgttatttacagcgctctgacatagtttgatgtggtaggttctttctcaggaactcaatttaactattatttattgatatatcattgcctttgaaagcttctactggcacaatttattattaaaactttaaagcctagtctcttca

SEQ ID NO: 176 - protein, 1042 aa, Mus musculus
KETGLTMRPKTFPATTYSGNSRQRLQEIREGLKQPSKASTQGLLVGPNSDTSLDAKVLGSKDASRQQQMRATPKFGPYQKALREIRYSLLPFANESGTSAAAEVNRQMLQELVNAGCDQEMAGRALKQTGSRSIEAALEYISKMGYLDPRNEQIVRVIKQTSPGKGLAPTPVTRRPSFEGTGEALPSYHQLGGANYEGPAALEEMPRQYLDFLFPGAGAGTHGAQAHQHPPKGYSTAVEPSAHFPGTHYGRGHLLSEQPGYGVQRSSSFQNKTPPDAYSSMAKAQGGPPASLTFPAHAGTASHHKPAATPPGAHPLHVLGTRGPTFTGESSAQAVLAPSRNSLNADLYELGSTVPWSAAPLARRDSLQKQGLEASRPHVAFRAGPSRTNSFNNPQPEPSLPAPNTVTAVTAAHILHPVKSVRVLRPEPQTAVGPSHPAWVAAPTAPATESLETKEGSAGPHPLDVDYGGSRCPPPPYPKHLLLPSKSEQYSVDLDSLCTSVQQSLRGGTEQDRSDKSHKGAKGDKAGRDKKQIQTSPVPVRKNSRDEEKRESRIKSYSPYAFKFFMEQHVENVIKTYQQKVSRRLQLEQEMAKAGLCEAEQEQMRKILYQKESNYNRLKRAKMDKSMFVKIKTLGIGAFGEVCLACKLDTHALYAMKTLRKKDVLNRNQVAHVKAERDILAEADNEWVVKLYYSFQDKDSLYFVMDYIPGGDMMSLLIRMEVFPEHLARFYIAELTLAIESVHKMGFIHRDIKPDNILIDLDGHIKLTDFGLCTGFRWTHNSKYYQKGNHMRQDSMEPGDLWDDVSNCRCGDRLKTLEQRAQKQHQRCLAHSLVGTPNYIAPEVLLRKGYTQLCDWWSVGVILFEMLVGQPPFLAPTPTETQLKVINWESTLHIPTQVRLSAEARDLITKLCCAADCRLGRDGADDLKAHPFFNTIDFSRDIRKQPAPYVPTISHPMDTSNFDPVDEESPWHEASGESAKAWDTLDSSKHPEHAFYEFTFRRFFDDNGYPFRCPKPSEPAESADPGDADLEGAAEGCQPVYV

SEQ ID NO: 177 - DNA, 88552 bp, Homo sapiens
cttgggtctgcgctttggaaccgcggcgtgagcgccccgggaagatggagcagtcgccgtccacgccaccgccgccgcccggggctcccccgtccctgcggggccagcagcagctccagccaccagtgcccggtctcccggcgcgagaggcccgggagccgccggccaggacgcccccgagggtgtagaccgcgcccctggaggtgagggggctgggagctggggtcggggcggcagctcggagggtggcgagagtttccgcgaagcggtcgagccctgcggctccgcgcacctactgtggtgccgaggctccgggaagggcgcccggcggggcggccgaggaagtttgtccggacggagccctgcgccctgcccccacggtccgcgcccgcccggagccgcccccgcccggcggctcgtagtccaggccgtacggagcccgcggagccggttccagaggagccggggaagttggaggccggcgtcgggcgggggcagcggggctgcgccgctttgttgtgcggcgaccggggcggccgggatcccggcggggcaggggcggcgcgggccgggggcggtgtcctagacccgaaaggccgtagcgccgggcgcgcctctgcttccgctgtctccgggggatcggcttttcactagacgcccggccgggcgcccctgacagcctcgggacccccggtccggcggcgcagcggtcccacggatccggggccatcctcccggccgcgccatcgtcccacgggccaatcagtccttcagagcccgccctgttggcccccgccggccgccccgtcgtcccgcgagccgacggacccacggcggtgccgcagtcgaggccgcgccgcccctcagcccccggtggctgcgccgcctcacccactgccgcgcggttcccaccccgttccccgcggccgcgccgccggctcacgggccagtcagcccctcagaggccaccggaccctgggggcgccgttcctcccgggctgcgggcggccaggccctgctcggcgtctcccggccggctgccgcgccaactctgcgagtttgctcacggtcttggcgggacgcggcccgaggcgcaggagcgctttcgtggccacgcgaacggcggccgttgcataacacgccattcccgtgccctagtttagcgacgtgtggggggtttggctttctcttctgatgtaagctcacctgcgcttagctccccagccggactctggagatggggattctgacatcattcacatcttgccatcacatccttcagcccaactccagaacttctggggagctttccctcggggatggagtgcggcctggagcaaacccgtttgtgaaatgcaagtctccagtgtcccgagggttgggaacggggggcgaggcgaggaatggaccctgaagaaggtaaaacccacccgaccagggcgccaagcagccggtaacagggtcccgagttagctcggcggctggcggctgttctgaggcctttggatgagaaatgctattttgcgaggatcaccatgaaagaacttaacttgcagatttttttgacaaaaatgttgttattttaagacaagatctcgctctgtctcccaggctggaggggagtggcgcgatctcggctcactgcaacctccgtctcccaggttcgagcgattctcctgccttagcctcccacgtagctgggattacaggcccgcgccaccagcccagctaattttgtattttttagtagagacgggtttcgccgtgttggccaggctggctctcgaactcctgacctcaggtgatccacctgcctccgtctcccagagtgctgggattacaggcgtgagccaccgcgccccacctgacaagaattttgaacaagaacttttacattttcacgcttctctaggatggatatgagtgttttttgttgttgttgttgttgttttttgagacgttgtcttgctctgtcgcccaggctggagtgcagtggcgcgatctcggctcactgcaacctcgcctcctgggttcaagcgatctcctacctcagtctcccgagtagctggaattacaggcgtgtgccaccacgcccggctaattttttgtatttttagtagagacggggtttcgctgtattagccaggatggtctcaatctcctgaccttgtgatccgcccgcctcagcctcccaaactgctgggattacaggcgtaagccaccgcacccagccaagagtgcttttaatgtaatagcattaaaaaaattatttcaccttaactactaagccatagagtatacatttggccggtaaaaaattcaaattaatagctgaacagctcttttcacaaagtattcaacaaatacgtacatttttaaaggaaagtttgcccgtattttaataagaaacaaatatactgaaatttgaatgggaaatcacaaaaatgtgtgtgatcttgcacaagtgttttgcttaaaattttaacttagaagatgaggggccttcccttaatcatggaaaaagtaactcatggctgattattaggaaatttgtgctaaatcttgttgtatatttttggtaagctgctttgtatgttttttttttttctgtaacaaccgttgtaataaggtagtaacagaaaaaatattccaaaatgagaacgtataaactgtttatgacgtctatttaactgtaattaacaagtcagtgtctcacaaaattttgtctcatgcaggtatagaaggcactgaatataataatagtgtaatgaatataccagcattcctttgaatataagttggtgaacatttaataactttccaaatctcaggcagtttaaggtatctgagcagaggctagcctgtcttgcaaaattaccaaggtgaattactagaatcattgaattatagaactggaagggattcttctggcttctccatcgagtttgaaatagtttaagtgtaaattggagctgtacatgttccttagcaaatcacagggttggtgggaggggctttcttttggtgggaggggaatgattttacaataagattccttgttattttaaatgctatgttgtaaatagccagccttgggctcctaaactccaccaaggggtggggtagggtggggattgaagctgataaattgaccataaacagaggaaggatttcgggaagctggggttaggggagaggtgttcttttttgtattggaaaaaccataccaacaccattttcgaaaagctgcttttgtattttattttgtagttaaaatcttgtgaaacttctgaacagtatttcttactgactttttaaaaacagttggtgtgaagaaatacagaaggtaaattcaaatgcattgactctgtcttgactaaatctgttctaaaaagtaccgaaatattctgatgatcagaaagaagggtaaggcttgattgaagtgactgacttctagctttaaacattctctgaatcttcttccttttaaaaagtctattgcttagtaattcctctagaaggaatcggccttcaaattacacaagtccaggggcatcgttcccattgtatgctaggtcactgctgctctctgtaatgggctttattacatagagtgccctgtgatggccccagtgtgagggcagccctgcttgggatgttcatttcactgttagctgttctctcagtattttaaggctaatgttacataatgttacgtgatttttatttttcatttttttttatttttgagatggagtctcgctctgtcacccaggctggagtgcagtggcacaatcttggctcactgcaagctcctcctcctgggttcacaccattctcctgcctcagcctcctgagtagctgggactacaggcgcccgccaccatgcccagctaattttttttttttttaacttttagtagagacggggtttcaccgtagtagccaggatggtctcgatctcctgacctcgtgatccacccgcctacaggcatgagccaccgcgcccggcctgttacgtgattattagttttattttgaaagtatgaaaacagcaaggtaatattggaaataaagacattggttatgatgttaaaattagaatggaaatttggcattgtttaatgtttgccgttcaccctgggaagactttgttggttatcatctagatcatgtcaagttaattgtgacaagtgttttaagttaattcacaaatactttttgtttgtgtgacaatatttgacatacatgggaatttttctgggagaaaaatgaaaaaatcccatattttgtagccatggtttgtatttcttgttaacactgattgttagaatcttgtagtgtagtttagatcctatagacccttgatcagttaggatggtaaggatcttaagaatgtaagctggattttgaaaggagtgggcctctgtttggaatagtgagcctccctgcctctaggcagttatcttgagcaggaatgctaagggccaacatggttcattactagttaactccattcttactcgggagtctcactcatttttctcattaaatgtacccggacgacacctgcaccctccccaacattttttggctgttttgttcatctttctctcccacgtttgagccttttcattggaagttccaggctccaagaatagcttcacacttcctccatcaaatcatagcccttccagcctttctaattttggtgaaacatccctttctctaagataccttctccaaataatctcaacaccttcctgaagaattgtgctcctccatggaagtaggcagggattctttggacagtcacagtatttattacttcagtccatagcagtgattctcaaatgggaggggtgttctaactccctagctggagcgtatccaaaacttggaggggtgcagaggaggcaaggctttcttaacgattgagaacccctgctgggctatgaaattgaatataagatggcccatcctgttgggtcgcttgctattaggaaagctgcaaagaactaataatgtatctgcaacttggtcactctgttgtgatatcttgagtacagacttctgtagctcaatttttttatgccatttatatttgcataatgtatatcataaaaatataatgtacaaagctgtctaatagagaatgtgatggtgtctttttccccgagactgtaagcttatgtagaagtgatactctggctgggcatggtggctcatgcccgtaattccagcactttgggaggccgaggcggggggatcacttgagtccaggaattcgagacgagcttgggtgacatggcgaaaccccatctcatggcgaaactccccctcagatcttgccactgcactccagcctgggcaaccagagtgagaccctgccccccccaccaaaaaaaaagacccaattctacctaggtgagaccttatagtgtccagcacaatgctcagtacacatatggcaatgccaaattctctgaggccttgtgatgatgctgctattggagagtgggaattcttctaaagtgtgttttcctggatccccagaggaatgcaatcactgccttcctcaaagaccctcattatgagaggtagcccttggcctgtggcttcctggcttgacagtgctggtgtggtacatccacatagtggtttatgattctgacatttagcatctggctggaggcctggcccgtctgcctgatttagtttcagctttgctagttaattatagtagggatatgatttaaataatagctggaattttaggttcaagaaatcctgcttcagaaaatgccaacatgtgtcattagcgcaggtcccatgagacattggtttggttggttccttggttggtgcttgatgtgtgtttggcagccagtgtgggtttgtgaagcactaggataaattagaataaaaattcttgaacatctgatagcattttccaggattggattgagggttggaattgggtttggtaggaccaaattaaaggcatgcttaaaattttgctctcacattgtttacacaggccacctatattaagcatgggatttagtagttgtctcagctctggatttagagaatgaggtgtttttgttttgtgagttgttatggttttaaaattccagtgtttgtagtttgttacttaaaatgtgtgtgaatcaattggtgatgccaaagaaatttccaaagttagatttactttgcttgatatccccatttttttaaagtccacatccatgagggtcatatttataaaactcttgatgaaagaaaaatttcccgtatgtgaagtctcattaaaatggtatagtaatatgtcagagttgttcatttccagctgcagtcttgactgatgagtattctcatgaaaattctttcaaaagttcataatttggccatgaaatcaactgtcttcaaactaaagcttaaaatacactgtctgaagctgaaaaaatgctttcattctctatgaaactgaaggaacgtttcatcctttctaaagtactcaggcaagaacacagtttatccgtaggtactattttttcatattcacttaagacagggacagcccttgtggtatccctagactagtgcctcactatggtgggagatggagaaaaaatcagaacagcttgtggggtcctccccctccctccgtaccaaacaaaaccaggtggtaggtttagggatgtcactgaataatcctctcaacctttttgtatgtttgacatttttcataagcaaatgttgaggggggaatggaaaaagaaagaaaaaccaggactcctgatctggcttctgttcagggacacggccacttagtatttctttgctcaggtataaacagacatcgacatagaaatgtccagtctcgactaccctggttgattttactatttgaatgtttgtggcacccacagatgcttaacaccccaagtgtctctaggagcgtggctctgctgtgagtcagtgtccgtgtggtggagggccagtggggtggggaggtgcagctgccctagggtttggacttcacgtggagactttgccctgctatatcctacccagtccctaggtccagtcttctcattgtgtagctatgtttatttatttatttaaattttttttctttttgaggtggagacttgctctgttgcctaggctggagtgcagtggaatgacctcggctcacagcagcccccgcctcccaggttcaagcgatttccagctaatttttgcatttttagtagagacagggttttgccatgttggccaggctggtcttgaactcctgacctcaagtgatcttcctgccttcctgcctccagctcccaaagtgctaggattacaggcatgagccactgcacccagccgtgtagctatgtttaaaaagggagccgttgttcaaacacgagtttgctaaataggagtagttaggagacttttttccccatttttaaaaattgaggaaaaatatacatatttatccttttaaccattcttaagtatacagttcagttaagtggcattaaatgcaccattactgcaaacatcaccactgtctatacataagactttttcatcatcccaaacaaaaactgtaccccttaaataaaaattccctgttcccctttcttctggtaatctctcttctttctgtctctatgaatttgcctgctggaggtaactcacataactggaatcatacaatatttcctttttgtgtttggcttatttcacttagcataatgttcttgaggtacatctttattgttgcatatgacaggatttccttcctttttatagctgaataatatgccatagtcctgcgacttttgttctgtgtgaacctcccttgggcccgtttcatttagacctgcatgttaaacttcagagaaggtgctgctgttgactgaggcttcgttctcctttatcaccttagacctttggggtggcactggcaggctttgtcctcagtgtggaactgaggacgcagattcggtgctgagtgactacctgtgtctttcaacagatgttgcgtgggcctgtgtgcacatgcctgggagtagatgggggtaaaccaaacaggatgctcctgccctcgtggtgctatcaggttcttcaagaggaagcacaccagccagtggtggtgctgtgggaagggctgggagtgaacatgtatggtcccttagattggggaggtcaggaaggtccttctgtgggaggggttctgggctgaggttttaggagtaggagtgagccaggcaggtggggttgagttgggctttttttttttttttttttttttgagacagagtctcactctgttgccaagctggagtgcagtggcatgttctcggctcactgcatcctccgcctcccgggttcaagcgattctcctgcctcagcctccctagtagctgggactataggtgcgtgccaccacacccagctaatttttgtatatttggtggacacagggtttcaccgtgttggccaggatggtctcgatctcctgacctcgtgatctgcctgcctcagcctcccaaagtgttgggattacaggcgtgagccaccgtgcccggcccagcgttgggtttttctagctgagagaaaggttttgcaggttggggaggacaggaagcatcggtgcctttgacatacacaggatcacagagtcaacccagacctgctgtttgagccgcagtcagcatcttgaggctcagatgctgctcagaactgaccaacctggcacctggctgcaggcacgtttcagagaggaaagacttaagcttttcttctctgtgtttttctgtctttacagttaaaagaaagctactttaactttctaagcatcattctcaaacactgatttaaagaggagtcactcggctgggcatggtagcccgcgcctgttatcccagctctttgggaggctgaggcaggtggatcacttgagatcaggagttcgagaccagcctaggcaacagggtgaaacccccatctctgctaaaaatacaaaaattaaccgagtgtggtggtgcacgcctgtaatctcagttactcgggtggctgaggcacgagaatcacttgaatctacaaggtggaggttgcagtgagctgagattgagccactgcactccagtctaggtgacagagtgagactctcccaaataaataaataaaaaataaagaggagtcacttggagcaagcaacctgtttctgtgttcagtttggtaatttttccgtggtcttatctcctggcctcattaaaccttttttgcctaacttattataaatctttaattagtaatggtgataattgatcagtatatcatgcattacagattgagcctgctgtcacacacagcaccactgtgatcctcaaggcaagcctgtcaggtagacagtagcgggtgttagacccttggtaccgtgcaggagcttgaaactcagcaaggttaagtgacaggctcagaccacacgctcagtgccagagctggggaaggacccaggcctcccacctccagccactttagcactgcacacccagttttcagtgagcttcccctccctgtgctttttaaacagggtcttgctctgactcccaggctggagtgcagtagtgtgaccttgactcactgcagcctctacttcctgggtttaagtgattctcccacctcagcctccggagtagctgggaccataggtgtgcctccacacctggttaattatttaattacttttagaaatgccgtctgcctctgttgcccaggttggtctccagctcctgggctcaagcagtcctcccaccttggcctcccaaagtgccaggattacatgtgtgagccactggacccagcctgccctgtgctttttcacctttggtcactgccttcctcctccaccactgacactgctctcctggtgggccgcattgcccagacaggtgaggtttcctggctcagagaatggcaccaccactggccccatttttcaaaccagaaacttgggctcatctttcatatcagtcctttccagtgaacattacttactcctatgggttctacctcttagtgctgttgagtgcacccacttttctctatcctgtaactgctctctatttcagatccccataattctttgggcaaactttcattgtgacacataccctatagtgtatttaaataattgattttctcctctaccttcccatcttgagctatgagctccttaaagtcagaggcaaatcagtctttctgcatcctcaggaccaagtaacagggtcaccttgtgtgggtgttcaggttgtgcactgctcaagggccctacatataagagggcttgtctcacatcacatgtatacacatttatatgagggcatgtgcagtctgcttggagacttttagccactcacagaagacctgggtggcagtagagactcacctcccctgacacggcgtatgcgtcacacatcttctagagggcagacatgatcacccttctctgtgacttgcactaagaccatttctttctctcctatgcctcagaggtcccgttcacgccttccatttgactcagccttttcctgccccccctcacgtggctgtggtatcatggcatgtctatgcgtgggccagggcctcttgcccacagggctccagaaagctccccagggagagttgttggtgctgtacaataatatagaaacaaaaaacttcttgaggaaggggtgcctttttacagtctctccaggggctctgccagtcgctcttcagcgtatttggcacggcgatggtaagcaaggccttgagccgagcacccacgctgcagctcctcacagctctgggcctggagccatggcaacctgaatggcagtggtgccatttgtaatagcccagaccaggagcaacctaaacgtccattaggtagaatggatgcataagttatggtgtattcatacaaggggatattacgcagcaatgacaactgacaggcttctgctatatatatactacgtgtatgaatctgcaaatatagtgttgaaagaaatgtgctaaactacagagtagagattgcataattccttggatatacagttcaaaaactggtcagactaatccttggtgttagatgacatgaaggtggttccccttggtctgtgggggcctggaggcttctggggttgtgataatgatacacttcttgatttggatgctatttacaagagtgtgttccttggtgaacatttgtcaatcttacaatctgtgcagtttaaaaaatatatgttaaataagtagattgcccctaccccctccacccccaaaagccttactgttcctcctggctttcagcagctttccatctatgtatgtatgtatgtatgtatgtatgtatgtatgtatgtatctatctatctatctatctatctatctatctatctatctgtctgtctatgagacagagtctccctctgtcgcctaggctggagtgcagtggcacaatctcagctcactgcaaactgcacctcctggattcaagggattctcctgcctcagccttccgagtagctggactacaggggtgtgctgtcacacctggctaatttttgtatttttagtagagacagcgtttcactgtgttggccaggctggtctcaaactcctggcctcaagtgatctgcctgcctcggcatccgaaagagctgggattataggcatgagccacggtgcccggccagcttcccttctttagagcagattccagagagagctttccagcctcagagtcaaccaggacctccttcagccacccccaactccctttgctctgctcatgtgatgggggagaggacatccctgcatcctggctttaacatggaactttctcatggttctttttcttcagtctgcagtgtctcttgtggctcttgccctttcatagctgagtgaaaaacagcttgccccttctgtgccctgctaatgtcactgctggtaaaaagagacatatcacaggtggctgctcctgtaaggaatgtgagtgagccgggagggcctcagccatccactcacctggtagctccatttcatggctgagcaggcaggcctctggccgggcaaatgtcccatatgcagatgccagcacccctccccaccatcccccatctgtgcctttcattccagacctgaaaccccttccccttgctccccggggctgctgctcctcacccagaagtgttgcacttgtcccttctaagcccaccttccactcaggccgtgtcactccttagctgaaccataggcagtgactgcccatcctctgcactgagtccagactcaacatggctgggaattgagcctctggatacctccatggtttcatcccacgagacacccccactacccccgagtcctttgacctcctatgtctccaggaagagcctgcattgcacagacctgaatgtggtgggtggagcctaaaggcttctttgcatatgctgttccctctagctggaattccattcctcctgacactcaggtctaattatttctagagctctttcttttttattctccaggcatctctctttttttgaagttgtttatttgcctgcctcaccccagctttcacttgacagtaaacttgctgaagccaagattttgttttcatttatcctatcagtgcctgagattcagtaggttttttttatttttatttttatttttattttttattttttgagacggagtttcgctcttgttgcccaggctggagtgcgatggtgcgatctcggctcactgcaacccccgcctccctggttcaagtgattctcctgcctcagcctcccaagtagctgggattataggcacctgccaccatgcctggctaattttttatgtttagttagtagagacagggtttcactatatgttagccaggctggtctcgaactcctgacctcaggtgatccgcccgccttgacctcccaaagtggctgggattacagacgtgagccaccacgtccagccttgagtaggtatttaataaatgtttgtatggtaggtagagggtggatgggctagatgagtagatggccgagtgaatgtattttgagcatgaagaaactctctgcgtattgtcaggccctcccttgcattgattgttcttgtgaagatagtatggctgtgttttctctattttagttttcaaagaaagggaagaaaacttaagattggaaacaaagtgatttgtgtgaattcctataggaaaagaaagaactctactgcctcttcccagacataccgagtcacttctaggatcctccatactgcttggcatcaccttgagaacctctccgtttttgtcggaatgtgaagttacggttttacaaagttaggtatttcaaaacagatgcttagagcacaaagtcactgaaatgagtgtggctgcaatatgccccattttacaccaattaagcagagctctaggcttctggtatgtggccagtacaggccccaggggatctgggctgtccctggatctaatagctcaatgtctgcacagtcttacagtcatttcagtgactttactatattatattgtgtattaaaatagggatttcatgttgagaaatttatttagtctctctcttatcttctaaatggaatcttctcacaattacattgagaaaggggatagttaaaacgcttacaatccccttcccatctaagcaaggactaggaattcaaatgtcatctcttagtgtttgctattgcatatggttgtgcaatagatctatgtaaattaattctttgaaccgcacctgacacatagtaaggctgggtgaatattagctatccttttttttttttttaatccacttgaaaaagtctgtgaagcagggtcgcggtttacagttataaagttccttacggaagctaaacatccagatccctctgcccatccccgtttagagggtactctttttggatcagttgttcttcgtttattaaaactcaaaatgattatccttcgaaatctgctcattgagttctgtggagtaagggggagtgggtgagggaaggggcagccactaagggctttggcacggtgtggggtgctggccctgcctttcccaccagcgggcaccttccctgggttagagcagctggttatataaacattcatcacggggtgaagaatagggaggatgttgtgtgttccaagtactgcagggcctggtacccttgtcatctgacccggtgctcaccactgtcctaagcatccgtctctattacatagcagggagtggggctgagggaggcgaagggactggtccagggtcacccagccttgtgacaagtgacctgtgctggctgctgagggcggtgttgacttggactggattttcctttctgaatcaaagaacagcagagtaggccgtgaacgaggcctggggtaggtagaatttactattggaaaatgcctttgtgacatcgcgttccatgtaacgaggccatttccatgctgcagttgtagttctgtagtaataactcttacccacatgatcatttgatgttcatgtggccatggtgcactctgagaagttgcctacatgctgttaccagtccccttccatgtcagtatcaattgctacaagaaagatattttaattttactatttaggtcaaaatgctggtaagtggccaccttgtaaaaaacaaaggaagtagttaccttcaaagtctcataatgtgtgtgtggaaactgcaattgaaacatttgcaacatgggacagttttaatgtgacaggctttgtggtgtcttttaggaaaattgggagggttttataaggaaaagttcagaaagttttctaaagatatggaaggaccacatctcatgtgaggggggagaggttagtaaagccatggggatgaaggacaaggagtggattggttattaggaacaagccagaaatccaagatcccatgtagaaaatttaaatactcctcaagctgtgggtttcaaaataaaattttattataatgaagtattttaaatgagctgtcagttgttaatactactgttcttgccctgagttgaatatttatagcaatttactttattgcagattacgtattacaggaagcattttgggacagccgtagatgtcatgtgctctaaccatggttgaacagtatttttgtcatttctgagaggtgatgcgttctttcttttctttccaagcggtatatttccacgatcactgtttatttctgaaaagtagcattaacgttgcgtgaaaatgacaaatgaacatttctctcccatttattttctttttcagagagtgataatcttcaaaatgaagactttggaaaattttaggttctctataggaactacaaaaatggaaggaaagaacattttcaaaaggaaattattttgaaagtatgtttacaacaaactgatactattgacagtttttttttttaaataataaaacactttaagaagattgtatttatggtaaaaggaaactggactaacaatgaggccaaagacttttcctgccacgacttattctggaaatagccggcagcgactgcaagagattcgtgaggggttaaagcagccatccaagtcttcggttcaggggctacccgcaggaccaaacagtgacacttccctggatgccaaagtcctggggagcaaagatgccaccaggcagcagcagcagatgagagccaccccaaagttcggaccttatcagaaagccttgagggaaatcagatattccttgttgccttttgctaatgaatcgggcacctctgcagctgcagaagtgaaccggcaaatgctgcaggaactggtgaacgcaggatgcgaccaggtgggtacagacctctgcagggccatgtgcagaggcagctatgggacagctggggcagtcagaatggtttggcaactacttgaaggctttgaattggttactacttatacaagtgtttctaggttaaaaacccaaggcccttttaacacataattgaactcacaattgaaggttctctaccttctctctaaaatggtcttttgagctgcttttccttttcaggcaagttccagaagttgctgaggtctcctgaaattgtaatgtgtattttctgatctgttcttgtggagatgaaaagggctttcgtgcttagcccctttttttggtgtttattcgggttattctgagctatcgtggaaagagactggcttcccttttcttgttttggtttgtgcattttttttttcctagaaatgggagggttgagcaacatgcattggctattctctgactcggttttctcctatttaacaattagtgtatatgctgttacagggggtgtaactattaacatgttcaggaaatgggaaaaactagaaagaaaaagcttgagaaatcgtcaaaattgtggcaacagtctcacttttcagttgtttaggattaaaggatacattagtggaggtggcaccagttatacattaatacacagcttacagagatgagtgtggtggctcatgcctgtaatcccagcactttgggaggccagtcaagaagatcacttgaggccaggagtttgagaccagcctggacaacatagcgagactccccatctctacaaaaaataaaaagctggacgtggtggtgtgcacctgtagtcccaactacatgggatgctgaggcaggagggatcgcttgagcctaggagtttgtggctgcagtgagctatgatagccactgcactccaatcctggttagctgagcgagaccctatctctatttaaaacacacacacacacacacacacacacacacacacacacacacacccctacacctcatagccatacatttatgatctcttagcaattcgtatacctgaatacaatccaaattgagggacaggaccatataaaatggaactagtgtccaaccaggtaaaaatgtaattagtgaaatgtaacaagtaaaacataattgcattatgaaatgattcatgaaagccagtgttttattacaatctgtcatcttaaaaattacagttgcatgaagcggaaataagctaagtatttttggtaccttggaaaagtagtaagatttcatgctcaaagcacatcagaatggcctgagcacttctggtttcttagaaataacctaattacatactcctggtgttgcagtcataggaaaaggctaacagtgttatttgttatttccaaaaccactctcaatcctcttgtagtttattaccatagaccttaaatagagaatttacatttctcagaggagatgtttgtgaaatgaatcctgctgttttatagagggcttccttgataatttgggccatactgggattaacttgtatatagtgaggattgttatgtcgagctgctttgataaagcacagggttgtgagtaatgtggtgcagagtgtttcagcagtgaagctgacagcaaaggcacagacattctcattgtgaaagcatgaagttaaatatgctgccaagcattatcccttgacgtacagaacccagcagttttgaaagtagggaaggagcagtcctggggaaatctggagtaagattgcagagaaactttcaggccaacagcagagcttaaaatcttctcctgtaaatcacttgcagacaaaggaggcaaaccaagcccctgtgttctttgcggttgtgtttcagctgtgagaaaaagaaacaagtcaagcaaataatcccaaatacaggtgggatcttattagggtaaaatccattagtgataattatagtgcaagaagtaataaagccagtgctgtttccaatacagaaacacaaatacactaaaagtaaggatcatgacaccgatgaagtttccatcaacatttaatttatgttaattgctagcagaaaggcctccatttaccatatttaatgcccttgaaataattcattcagtttggtgtgtggtgttactttataacttaaaacagctgtgcctccacctttcccctccaactcacacttttcttggcctagataaaaaatgtatttgcgttcagaaaattcaggtaggaaagtcattatgtgaacccaaataataagagaaaaagataacagtacctttagagttgtatgcatcagtttgttaaaaagatgatttgaattcagtataatagagttcttttttttttttagacggtgtcttgctctgttgcccaggctggagtgtggtggcgtcatcttggctcactgcaacctgggctcctgggttcaagtgattctcctgcctcagcttcccatgtagctgcgattacaggcacgcaacaccacgcctggctaatttttgtatttttagcagagacggggtttcactatgttggctaggctggtctcaaactcctgacctcaagtgatctgcctgcttcgttcggcctcccaaggtgctgggattacaggcgtgcgtcaccacgtctggccgagagttcttattgttgcagctttacccctttcactcctactgttttttgttttttgtttttttttttgagacggagtctcgctctgtggcccaggctggagtgcagtggcgcgatctcggctcactgcaacttctgcctcccaggttcaagcaattctcctgcctcagcctcctgagtagctgggattacaggcacccaccaccacgtccggctaattttttgtatttttagtagagacgggtttcgtgttagccaggatggactcaatctcctgaccttgtgatccgccctcttaggcctcccaaagtgctgggattacaggcgtgagttaccatgcccagccactcctactgttttgtctgtttaagagggttttgctctgttgtacagtctggagtgtggtggtgaggtcaatgctcactgcagcctcgaccttccaggctcaagcaatcctcctacctcagcctctgaagtagctgggactacaggcgtgccaccacgtctggccagttttcaaaattttttctagagatggcatctcactatgttacccaggctggactggaacttccagactcaagcggccttaacctccaaaagtgctggaattataagttcaagccaccacacccagccttaacttttaattaaagtaaaatttactttaaaagtgcacaatttctaagcacacagcatagtgaatttttgcatattaaacccacccatgtaactagcatgtttgggtatatttttaattaaaatactttaaaatggaaatttctggaaaaagtaaaagactcaagggtattttctgtgtaaggatataatgtgtatgtcaaatgatatgtttattagtcttttgcacataaattactgaaaacttacaaaaattcctgtagaaaaaaactaggccactagattaatatttcttatgggaggagctgctctttaaatatagatttaaggaattggaaaggtaagttttttggttatgagtatcatattttgagcattggatagttattggcataagtgatcatttaagtttgcatttaaatatgcaaaatatttctgttctgcggaagcctgggacttgttttctctctggttgcagtggattatagggggaacatctgcatggtgtgggtaggtgggggtgtcgtcagctcactgcactcactgttcttaattatagcactcaggatggtgcctatgagtcctgtgagggtgaggttccaattcagtaactcccaggggaggcccatggccccctggaccccttagaatagcaaagcactttatcacatggtgtcccctctaggaagacttatgtgagaactttgtttggatgcgagtgctaggaaagggttctgctttccttgagaaactggcatgggctttttctctgtggatgacctgtatcctgcctgtccaccctccctctgatctgctgaggggtgcccagtctgtggctcagcattgatacattttcctggtcctgaatattgtgtcagctgtaatttcctaatcctgattaatccagttctttccccccactttatcatgtttaagtgatttaaaactttaatggaatgaggttagggaagaaatgtaaacaaacaaactgataaactgattatattagatcaaataaggaagggcataaagaagacagccagtggtcaggatgtgcactgagaggcggccttcctgagaacagtgtccacaccagctgctcagtgaatcaggggccatctgcttaataagaaaagggagtgggccaggcgcggtggctcacacctgtaatcccagcactttgggaggccaaggcgggcagatcatgaggtcaggaggtcgagaccatcctggctaacatggtgaaaccctgtctgtactaaaaatacaaaaaattagccgggcatggtggcgggcgcctgtagtcccagctactctggaggctgaggcaggagaatggtgtgaacccaggaggcggagcttgcagtgagcccagatcgtgccactgtactccagcctgggcgacagagcgagactctgcctcagaaaaaaaaaaaggtgaacacatgcctcaagggggaagtagaatgtgattgttctctcagtttaatgtctctctgggcctaataatttaaaaggactcagattcctcagataagaattcttttctcatttccatcctcataggggttgcttctcctttccctcatgtctgtggggcatggagtttatcagggtccctctcccctcctctcattccctgggcatccatacatggctgccccccacgtccctggcagctggccagcctgactcccaccttggctctgctgcagctcctggggcctcccagaccctggtcttatcctccccacatgctcccctctacagaggagctctctgcagtgtctcagccacacagcatggcctcccagacagctcttcccgcttgcttactttgggtctctctgacatatgatttcgttggttggaagtatcaccacctatctggattctagtagcttctgtgattccactcagattcctttttacacaggctcttcctggttcttccacctggatcgagctgttcctattcaaacttccacagcaaagacatttctttctttttctttttctttctttttttttttttttgagacaaggtctgtcaccgaggctgtagtgcagtggcgcaatctcggctcactgtagccttgacctgggctcaagcaattctccgcctcaacctccaaagtaactgagaccacaggcgcacatcaccatgtctggctaatttttctattttttgtagagacggggtttcaccatgttgcccacggtggtcttgaactcctagtctgaagcgatacgcctgcctcagcctcccaaagtactgggattactggcgtgggccaccatgcctggtcagaaatttctttctttcttttttttttttttgagatggagtttcgctcttattgcccaggctggaatacaatggagctatctcggcttactgcaacctctgccttccggattcaagtgattctcctgcctcagcctcccaagtagctgggattacaggcatgcgccaccacgcccagctaattttgtatttttagtagagatgggatttcactatgttggtcaggttggtctcgaactcctgacctcaggggatccactcaccctcagcttcctaaagtgctgggattacaggtgtgagctgccttgcctggcctcagaaatttatttctaaccccaaggatgctccatgcattgggcattgtgttggcagattgtcatgttcccgtcttgctctccctgtcttaggcagtgtctctggaggcctggatcttgggagtttatccctctgtgcccacaaggcctcccatgttgcagagcatgtgctcaatcagtgcttgctcaccagtgaaagttctgtgtactagtccagccaaaaccctcacctcagttgtcagacactggaaaagatgctaaccagaaatgcagatctcctcgggatatttatttggcttaattctaacaatatgcatcaccaaaaaagctatagagaaatggtaacactaatctcctagccctttgtcttggtgacaagatcctgccacaggattcttcattgtactaaagatattttgctaatgaaaaagataaaaggaatttagataacatgtacatttcctctttctcacttcctcttgaaagggaaccaccgtttggtgttactgaacacgcgtgctgaaatattaataagaggagaaggaagaaagaaacacttaagtttaggaatgtcggtcatgtaacaggaaattgtattacaatggcttttgggtgtagcagttccttgccttttcccctttttttttcttagtggctttcaaattaaatttggctcttccagaaggcacaccacatacctttttaatgtaggaatttaaattactttgacaagacacaagcaaagcatacccctctgtgtcataatcccctctccccttaagccttgctcctagtttttgtttttgttttcttgagatggaatctcactctgtgcctaggctggagtgcagtggggtgatctcagctcattgcaacctccgcctcgcgggttcaagcaatgcgccatgcctcagcctcccgaggagctgggattacaggcatgcaccaccacgcccggctaatttttttgtatttttaatagagacggggtttctccatgatggtcaggctggtctagaactcctgacctcaggtgatccgcccgcctcggccacctggtaagactgctgttaacatgttggtataaaactgcacaacttttttctaattacaaaaatagataaagctttgcacagtggcagtgtcatagccaatgaagtttgtccaaggtgcgattattgctaattggaaactttccaataccccaccataacaacttgaaatgtagtcagcactggcgatttttgacagtctctacagagactgaaaagaaagagagagataaaataggtggggtgcagtgactcacacctgtaatctcaacagtctggtcggctgaggcaggaggattgcttgagcttataagttcaaggccagcctgggcaacagcaagaccctgtctatttttttaaattaaaaaaaaaagatggaattatatattaaactatataatacatataccacacacacactttttgtgtaacagaattgaggtcctgtagcccatcagatcaccccagtcagttctcctcggaagcacctcatgcactggcctctcctgcccccggtacaggctccacctttgctcctgggatcttggtggctcctggttgccccttctgcgtctttctccggccttccctgcacagtaccctcctcagtctgatttgttttgtttcggtttttgagacagggtcttgctttgtcacccagactggagtgtggtggcatgatcatggcttactgcagcctcgacctcctgggctcaagcggtccacccaggtagctgggactacaaacgtgggccaccgtgtctagcccccctcattctgaaaagggaagattctgtcatttcccttctggaaaccttttctctggcctcaggatggtgcctgggagttggcggacaggacccacctgtagctgcaggatcccagctgctggcaggcccaccctggccctacccgccctggtcctgaccaccctggccctgcccactctgcctgtctctcaggctgcccagtgctggccctgctgcgggaccaggcccacttctccctcagggctcatctttgggtctgtgattcagaaaagccttttctgagcctccagtcaaaattaggtccctcgttctctcccatgacaccataattttctcccccagtgtttatcagaatctgctgttaagtagtttgtgcgtctccctttgtagattttaaggcctgtgagacagtggctttgttctagtcgccactttctaagacccagaactgtgcaagctctcaaaaacacctaacagagaagcacagagacaagcattacgtcataaacattttcattccattgaatagtcttttaaaatatgatttttaaaattattatgatttttgagatggagtcttgctgtgttgcccaggctggaatgcaatggcatgatctggcttactgcaacctccccctctggggttcaagcgattctcccccgtcagcctcctgagtagctggaattacaggcacccaccgtcatgcctggctaatttttgtatttttgtagagatggggtttcaccatgttggccaggctggtctagaactcctgacctcaggtgatccacatgccttggcctcccggagtgctgagattacaggcctgagccgccacacccggtcctaaaatatgatttttaacatttgcattgtattccattgttcaaatagatgtcccataatttattgtaaagagctggtcatgaacattcttctacacaccttcttatggatattactgacttccttagaatacattttaggaatggaattactagcgtaaatgttgagagcatttttaccattcttatttgtattgccaagtgggtttttaaaaatcattcaattgaatttatacttccaaccctgctaacgatgaatattatcactactactactaaaaactagaagcaactgtcagtttaatagttggcttttttgttgttgttttttgttgttgttgttgttgttttgagacggagttttgctctgtcgcccaggctggagtgcagtggtgccatcttggctcactgtaacctccgtgtcccaggttcaagcaattctcctgcttcagcctcttgagtagctgggattacaggcacgcgccaccatgccgggctaatttttgtatttttagtagagacggggtttcaccatgttggtgagtctggtcttgaactcctgacctcgtgatctgcccacctcggcctcccaaagtgctgggattacaggcgtgagccaccgcaagggctgggctttgtgttcttaattgcagtaatggatgtgtgtgataatagaaagtggtaatagttctccacttttaagtactagaaagctctcattttggcggtgagtagggaggctcttattaagtgcctgagactggacccactttcctgttaaaatgggcttttggccaggcacagtggctcacacctgtaatcccagccctttgggaggttgaggtggttggatcttgtcaggtcaggagtttgataatagcctggccaacatgatgaaaccctgtctctactaaaaatacaaaaattaagccaggtgcggtggctcacgcctgtaatcccagcacttcgggaggctgaggggggtggatcatccgaggtcgggtgttcgagaccactctggccaacatggtgaaacccgtctattaaaaatacaaaaattatccaggtgtggtgtcacacgcttgtagtcccagctactcaggaggctgaggcacgagaatcacttgaacctgggaagcagaggttgcagtgagccaagatcgtgccactgcactccagcctgggcgacagagcaagactctgttccccgaaaaaaggggaagggggcttttgaggaaatgccttttctctgctccctgaatgacttacctttgtgagtggcgcaggtcctaggtgggctctaggaatcactggctacttgcgtgctgtggtgttggtccctgcagccctttgggagctgggtccctccactgcgagcaacctgctcttctatcccagtgtgcagtacagatattagcattttttatgtgggctataatgtgaaaaatattggagatcataaatattgttcacttaatgcctgttgtgtcacaccaaacgtttactgctgagattatttgctgtcatgtggttgtagagatctaggtgggaactcatgtacagtctagattgatggtttttgttgcctggaaccccaattttgcctggcttgatggatggggccctgggagaggggctccgagttctgggtctccagtctgcatgcaattctgtgtgggggcttcatttaaactgtttctgtcattgccaaaccatttgtggatgtaaatagagaaaaccaacaaggatgtaaataggggaaaaaccaacaaggaaatagaatgttttatggcatttaacaatgctctcttttagaactatttttactagggttatgatgaatttcaaaattaaaaaaaaaatgccacatccattatcatagtcactacccagcttctctttattttggccttaaaatttacttgccagaaattcatagctcttgaattaaagccacattcatcatgcaattttttatatattaggttttactcgttttagatttcttttcttgcttttttgttttgttttggttttgtttggtttgttcttgtcaatagagatggagtcttgctatgtttctcgggctggtctgaaactcctggcctcaagtgatcctcccgccctggcctaccaaagtgttgggattacaggcatgaaccactgtgctcagccccatcttagatatattttgtagtagtgtatttagaggggagatttttttcatagttaaatttttacaatttgtaatcttctataattgacttatttgttagcggatgccttttttttcctaagagttcttgatgactttcctgtactgtgggaaacggcaggaaattcttctcccctctgtatcctcccccagcaacgagcctagctgtgtaggctcggcagcggccccaggtgtcagaagcagacaagcactaaatcaagctactggtagctgatcccactgcagaggcctaacccccagaggcagagtaagaaggatgctgaagatgagcaggctgtggtggcacggcagtccacagtgtcatcaggaataggcaccttctctctctatctgccacccttagcaagtgactccgtcttggcgtgcaccagacggcacctctgcagtggtgttccaggtctgagccagggaaggacgtgccggctctggctctggctcttttgtcaaggagcttccccaacacctccccggtcaggacccagttacttggtcatgggggtttaagcagccttggaaatgtgtacttcacctgggcacgtggccaccccaatgcaactgggcactgtcagtaaggaagaaagggaagctggaccttggttagaaagccatagtgtagccatgtgtcaccttggctgtgtcaaccagggcataccatgcaccttctgagcctcaggagtcctcatccacacacttgggatgataattgctcctatgttatgagttttcccgctgaccagaaagaatgtaaagtaactggcccgtggttggtatgcagaggtggcagtctgaccacaatgccatgtgtcattagtgctcagaaacttgtaaagttgctggagagctgggcttcctggtgctgtgacgtgctttacttaataataagatcgttgtcctaccagcctgggtgcgactggtcccctgtcccacagaaatcacatggagaagatttgctcaaacttgtggaatgtgtgtgtccttgtggttttgatatatatttgggtggttatgacattagaagaattattaatcatgtaatagaaataaaggttgttttgtacaaaagtaaatgattaacagtgacaaatttctccagccaagaagtacacatttaatgtaaattggaagcaacttcatttggcttataaaagctgttagtcagcagagagctgttgtaaagctagtggcatttggcatctagtaggcccaagaatgtggccaagtgtagtggaacaaattgtactctgtgccgtctgtcaaccttggagacgcttacaagagccttcagcgataccgtgtgtgtctgtcaccttctccatgccaagtggcttaattcaactctcctgctttggtgtttccactatttttctggcattttaggctggaactgttagagtaagaagccccaccctgtgactgggtatttctgtattgaactcggtgtgtttgtttccagtcttcccgtgcacatctctacctctctgtctgaggtcacagtagaaagagaaaccaagtcagcagggactcagctgactcctcctttcaggatttccttggtagtttccaaattctttcctctacaccaggagcgtgtgttctctcgcccctctaccccctattctctcccatcctccctgtttctctttctttctcaaccaggtctggtctaacaaaggttcctagcttacattgtctttggctctaggctccacttccagtctttctgttaatgagtactttctccggtggcctgctattttttttttttctcttaagtgtctttgctgctaacaccctgctctactatacctggattctccctgacccagtaattccccgggtggacttttcctgaatggcaagtgtcttggtagccactgtcttcaccatcctcttccaatctgatctccacttatttcttgtaccggcccagccttcctgttctcattgggtctgccctctgcacctcccatgccaccaggctatgaggttttctcccacactgggttcgctcatgctgtcgccccctgaagtgcattccccagccagccgtggtccacccttcgagtcccacttccacgacccatccttgtggccttctacggccattcatcccagtgcccgctaagttctttcttttctgaattcccatttgtgtcggtaccatccagggaaccatggtaggcctctcagggtcttagggattatttaggggtgtccaatcttttccctgggccacattagaagaagaattgtcttggaccacacataaaatgcactaatactaatgatagctgatgggcttaaaaaagaacgaaaaaaaaaggctgggtgcagtggctcacgcctataatcccagcactttgggaggctgaggtgggcgattgcttgaggccaggagttccagaccagcctggccaacatggcgaaaacccgtctctactaaaaatacaaaaattagccagacgtggtggtgggcgccataatcccagctactcaggaggctcaggcaggagaattgcttgaacccgggggaggcagaggttgcagtgagccaagatcgcgccattgcactccagcctgggtgacagagcgagactgtctcaaaaaataaaataaaaagtggtaagccataagaacagagtagaaatcagtttgtatgtgaatttagtcaaattgcagcacatagctcttacctataaaacagagtacctaacccattagaatgcagtgttgctgcaacgtattatcaacagtattgtttttatccatcattactgcacatggtaagaaaacggaaagtgaaacccttaggaactaaggcagtcaatagcaccaggaggaaccagatgttggctttaccagacagcacatttaaacagctatcatgaaatggttaaaatgacaaattttgttagttttttaaacaatttttaaaaagctattacaaatatattcagacaatgaaagggaaatgtgtcagaattaagagaaaatacagggttagtgatgcacagacagaaaatttttttttagtcgaggtcttgctctgtcacccaggccggagtgcagtgggtgccatcacagctcactgcagccttcccgggctcaagcaatcctcccatctcagcttctgaagtggctgtgactacaggcacacttcgccacgctcagctcactttttaacttttttatagagacagggtctcactattttgcccaggctggtctcgaactcctaggctcaagtgatcccatgctccccctccccaacttcccaaagtgctggaattacaggcatgagccaccacacccagccccagacaggaaatctttacagagaaatggaaactacaaaaatggaaactctaaactgaaaagcaaaataggtgaaaaaatttttattggctacatggtctcaacataacattaggtacggcagtagaaagaaccagtaaactgaaatataaattagtagaaattacccaatccaaaaatcatagaaaaaaattgaacagaaatctcagtgacttgtgggatgatatgaggttgtccagtatatgtgaaattgaaatccaagaatagaaaggaaatacctaaacatttgacacagtaatagctaaaaacttctcaaatgtggtgaaaagcattcatgtacagatctaagaagcttaataaaccaagagcaggatgaacacagaggaaacaactcctaggcctatcatatttaagctaatgaaagccaaagataaagacaaaatcttgaaagcacccagagaaaaatgatgttacatacagaagaaagataagattaaaagctgacttctcattagacagtataaatgctgcatatattgaaatgacacaaagtgctgaagaaaaaaatacaccgagaattttatatctagcaaactgtctttctgaaatgaaagtgtcgtaaagacatttccgggggaacaaaaatctgagaaaatttgttaccaggggacctgtattaaaagaaatattaaaggggtgggggtatggggggaaaaatgctaaaggatatacaggaaggaatgaagagcactagaaacagtagatatcaataagtataaaatactaatttattttttattttctttcttgtaatctctttaaaagacatcaatatttaaagtaaaaacaatactttattgataggtttatcatacctatagatctgatatacaacactatgagttgggggagttaaatggaaatatattattgtagagttctttttctttttttttttcttttttttttttttttttttgagacggagtctctcactcttgtcgcccaggctggagtgcagtggtgtgatctcagctcgctgcaagctccgcttcccaggttcacgccattctcctgcctcagcctgccgagtagctgggactacaggcgcccgccaccacggctggctaattttgtgcatttttagtagagacggggtttcaccgtgttggccaggatggtctcgatctcctgacctcgtgatccacccgtgtcggcctcccaaagtgctgggattacaggtgtgagccaccgcgcccggccagcagagttccttttctagtgtaactcaaaattaacatttaagtagattgttgatatagtttggatatttgtccccacccaaatttcatgttgaaatgtaatccccagtgttggagatagggtgtagggcatggtgggagatgattagaccatgggggtggatttcttttttcctttttttttttgaagtagagtctagctcttttgccaggctggggtgcagtgactcaatctcagctcagtccaacctccccctcccaggttcaagcaattctcctgagtcagcctcctgagtagctgggattacaggtgcatgccaccatgccctgctaagttttgtatttttagtagagacagggtttcaccatgttggccaggctggtcttgaacccctgacctcagatgatctgcctgccatctcctgacctcatgatccacccaccctggcttcccaaagtgctgggattacaggcgtgagccactacgcccatccccaatatctttttttttcttttttgagacagagtgtcgctctgttgcccaggccacagtgcagtggtgcaatcttggcccactgcaacctctgcctcccgggttcaagtgattctcctgcctcagctttccgagtagctgggactacaggtgtgcaccaccacacccggctaatttttgtatttttagtagcaatggggtttcaccatattggccaggctggtctcgaactcctgacctcgtgatacgcctgccttggcctcccaaagtcctgggattacaggcatgagccaccgcacccgacattccaatatcttttataaatgcaatataaatccaaacatccttaccaaaatattagtaaatggcatttggtaagaagatgatacatcaggatcaactgggatatatcccagatatacaaggttaaacattagaaaatcaatataattaatcatatcaacaaaataaagaataaaaccatttcatcatctcaatagatagagtaagcatttcagaaaaatccaccagccatttgtaccaaaagctatcaccaaactaggaataaaaggcaacttcctcaacttgctgaggggtacctctgtaaaatccacaggtaacatcaacatgtaatggtgaaaaaccaaataacttgcctctaagattagtaatacagtgtgatgtcctctttcatcttctgttggaggtcctagctagtgcagtaaggaaagaaaaaagaaataaaagtacacagattggaaaagaagtataacaatttgcatttgacatgatcctttttatagaacaccttaaggaatctatttttaaaagttaccagaactaataatttcctctaataatttagcatggtcacaggatacaaggtcagtatgcaaaaatcagtagtttttttgtgaactagcaatgaacacttgaaagttgaaatttggccgggtacggtggctcacacctgtaatctcagtactctgggaggccaaggcgggtggatcacaaggtcaagagatcgagatcatcctggccaacatggtgaaatcccgtctctactaaaatacaaaaattagcagggcgtggtggtgcatgcctgtaatcccagctaattgggaggttgaggcaggagaattgcttgaacccgggaggcggaggttgcggtgagtcaagatcgcgctactgcactccagcctggtgacagaacgagactccagaaaattgaaatttaagatgcagtttcatttacagtagtatttagaaatacaaaatacttagggataaatttaacaaaatatgtgcaagatctgtacacttaaaactgcaaagcattgctgatcacattaaatatcaaaataaattactgggtatatacccaaaggactataaatcatgctgctataaagacacatgcacacatatgtttattgcggcactattcacaatagcaaagacttggaaccaacccaaatgtccaacaatgatagactggattaagaaaatgtggcacatatacaccatggaatactatgcagccataaaaaatgatgagttcatgtcctttgtaaggacatggatgaaattggaaatcatcattctcaggaaactatcgcaaggacaaaaaaccaaacaccgcatgttctcactcatagatgggaattgaacaatgagaacacatggacacaggaaggagaacatcacactctggggactgttgtggggtgggggaagggggagggatagcattaggagatatacctaatgctaaatgacgagttaatgggtgcagcacaccagcatggcacatgtatacatatgtaactaaccggcacattgtgcacatgtaccctaaaacttaaaagtataataataataaaaaataaaaaattaataaataaataaatggagagagtatgttcacagatcagaagactcaatactgttaagacggcagttctcacagttatctgtggatccagcagaatccaaatacaatctcagcaggtttatttattttttttaattgaaattgacaagctgattgtgaattcatatggcactgcaaagtacctagaatagcaaaagcaatgttttaaaaaagaacacaggtagagtccttaaactaccttactttcaaaactgctagacctgactttggactagactattgtgggtagtctctaaagctaagcaagacagtgtggcattggcataagactagatagacaggtagtggaacagagtacaaaaatagacccacacttacatgggacttactacaattgattttcaacacaagtaccatgaaaattcaatgaggaaaagggcggaggttgagggtttttgtttgttttttcagcaaatggtgctgagacaattggatagtctgatgagtcaaaattaacatttactctgacctcacaccattcacaaaaattaagtcaaaatggattgtagaactaaatataaaacagctaaaaactttggggaaaaaagcataggataaaatcttgcaaccttgagaaaggcaaagatctcttagatccaacacaaaattcatgggacgtaaaaggaaaactggtagattggatgtttacaaaatgaaaagtctttactctttagaggacattaaaacaacaaaactcaatccacagaatgagaaaaaatattactgatacatatatctgacaatggactcacatttggaatatataaagaactagaattcaataataaaaaggcaaacctttaaaaatgggcaaaagatttgagtagacacttcacaaaaatatagaggaatgtcaaataagcacatgaaaagataagcaacatcattcatcatcagagaaatgcaaattaaaaccacaatgagatactactatatactcattagaaaggctaaagtataaaggtctgataatactaagtagtggtgagaatgtacagcaattggaattttcttaaaattcacatagaattgtaaagcagtttatttactaatgttttttaaattaaaaattgacatgaggttttgctatgttacctaggctggtctccatctcctgggctcaaacaatcctcttgcctctgtcttccaaagtgctgggattataggcatgagctatggtgccagggcaaaacaatttaagtcaaacatacctaccgtatgtctcagtcattcctctcctatatatctacttaagagaaatgaaaacatgtctacaaaaagacttgtacacaaatatttatagtagttttatttgtaatagcaaaaaactaaacaaccccagtgtccatcaacagttgaatggatgaattttggcacatccctacaatagaatgctaccaaccaaaacaaagaaacccgagggaccacttatacaacagcatcaatgggcttcaaaatcatgctgcacgaaagatgctgaacacaaaaagtacatactgcacagttttatttatttagtagtttagagaatggtaactcatagtgacaaaaagtggataattagttacttagggtggggtggagggagggagtactataaaggggcactaagaaaatttggggattgatggaaatattctgtatctttggtgtgatggtgattttactggtgtatacatctttcatacttgaacggtccagttacagtggatgcaaataattcgtttccttctcttctttcttatgcctagaggagggtggggcatccgatgggtattccagggattggtgttgatttcatgggcagccctctttatggccagtgctttcagaggtggcttaaagatggtcaggctaggtcttgggtggagagtctcttgcaaaacatcaggcaaaatcaaggccaaaaccaggctgtactttaaacaaaccttataacaggggtccctaatctagtcctagtcagagagtcacggttggtgaaaaaatcaacccagacgtacagggccgtatggccatcagtagcatctccacagctctgcttttttctagcctggaacactgaggggtcacagcaataatttcacttcctcctccgtgcagaggacaggagacctcaccatgtatgaaccagctgaccagcatacatttagtatgtccaaataatgttgtgagcagtgtcaggcaagatctgaacctgtctgggtcaatgagtgcagacctaatgacgatgagacagagtttcatagcatactacctcacgtgtcatgaagaggaataaaacctaagtgatccatcctgcatgacaccaaaaggtagagttattgaataagctggtactgttcctttcaagaaaccctccacaggtcttccagaaaatgatcccatgtccgtgtccgaccccctcaggtgccaaccagaaactcttcctcactcatgaccataatttttttttttttttttttttggagacggagtctcactcttgtcgcccaggctggagtgcagtggcatgatcttggctcattgcaacctctgcctcccgggttcaagcgattctcctgcctcagcctccctagtagctgggattataggtgcttgccaccatacccgtctaatttttgtattttttttttttttttagtagagacggggtttcgccatgttggccaagctggtctcgagctcctgacctcaggtgagccaccgcacctggccccgtgaccataaattatacctcattaaaggtgtcttacagacttcatgggagtagcaagtagtagatcagccataaaggaatactgattataattgatagtaacctgttaaatatataaaaatcaatgaatcaaaaaacaaaaccaggcaaaaagttatgggggaagcctggtctgcagggctgtacataaatgtgcgtgtctctgggcctggctgagcctgtggggacagccccaggccatgcgtggctttggaggccttgagatggggctcatctcaattgaggtgtgcagtgagtataggatacacacccgatttggaagacatagtgcaaaaaagagaatataaaatgtcagtatttctaacattgcttacttgttgaaatgttaatatttggatgtattgggttgaaatatacatcttttaacatcagtactttttttttttttttaatgtgggtataagacaatggaaaattccacatgtggctcgagttacatttctgtgggacagcacggtgctggtcagtgatgaccgtcaaagtgagatgtcatccgtgaggcgctatgcaggaagagctcccgcagggccatactcaacttttagatatgccctggcgagaaccgccactgaaccccactgaaagtccagccaacctaaaaagggttaacttttatattatttattatcatttattattattatcattcagagtctcactctgtcgcccaggctggggtacagtggcgcgatctcggctcactgcaacctccgcctcccaggttcaaacaattctcctgcctcagtctcctcagtagttgggattaccaggcatgtgctaccacacccagctaatttttttttatttttagtagagatgggtttcaccatgttggccaggctggtcttgaactcctgacctcaagtgatccctccccctcagcctcccaaagtgtctggattacaagtgtgagccactatgcccggcccattcctgttatttttcaagctgttttttctttttcttttttttttttttttttttttgcacagcgagacactttaacctttctggggaaggtctgtaaactccctggggggcccttcccgaggatgcctgcttgttttccaaagccccctgagttgtgttttgttttgttttttcttgagagggagtttcactcttgttgcccaggctggagtgcaatggtgcgatctcgtctccctgctacctctgcctcctgggttcaagcgattctcctgcctcagcctcctgaatagctgaaattataggcatgcgccaccatgcccagctaattttgtatttttagtagagacggggtttctccaggttggtcaggctggtcttgaattcccgacctcaggtgatccacgcggctcagcctcccaaagtgctggaattacaggcgtcagccactgcgcccggccgaggttttttttttttttttttttttttttttttttttttttttaaagccagtcatagaaaatgtgtcatttggtggacctccctcccatccttttgaaatcctaagaccttgctgtgttattgaccatcaatctcagacactgtctgggctctccggcagcgtggagagtcctggccccgcctcgagaacagaggccaaggacgggaagtgcaggggtccgtgtacttgcagttgggttctattctacccacacggtgtcttacaagttttttaaaaatgtctttccaacttttaagaaccaagagctttcacactgaaaattgggcctggagagggggcgagcgcctgtggtcccagtgtgtcaggagactgaggcaggaggatgggacgtagtgagaccctatctctaaaaagaaaaaaaaaaaggaattaagaaaattgggtttttagcattcctagaaatgtagaagccctgagctgcgtctcctgtgtgggagctggtcccactccccggccttcggagccctcggagcccggagccctcgatgcagcgctatggatgccgggagcgatctttggaaaggagtccccggctcgagcgacactgcccccctggggctctgcaggtgcatgcagtgggattgctgggctggactagagggtgagggtggcttcccccacaccccctttcctggctaatcagagaaaatcaaaacacccttgcccaagcgtccagctggagagtgaagaaggggagtctattgcttatttgtatatgatgaagattatagatgtgttctaggaaacatgattatttcctttaaagcaggaaataatctgcaaaatccctttatgaacataatgaggatcttttattctctcgcagggtggatagctctgtttatacccactccagtattataaaaacacataaatccccactctcatatctaaattggccttgtgtgtgtttgcttcatagtcctcatctctctcccccttcagtattacatttctgtggctcaggcagtaaacgcgggattcctaaaagcactctgacaataaacaaaaagctttcctctgactttggtacagttcatttgatcttttcaaacattttgaatgagggacaaggtgtgttttgcgtggttagaacaagggccagtgggtccaaggtccacctggaccaatctttgcaggatacaggaagaaccttctaaccgtgcagtacaaaagtgagatgtcagggattttaggctttcggggctagtgggggttgtgtttgaggaacttgaggccatctaggtgcatgcatggccttgagcaatggttctcagtcctgactcagtacatgcacttaggcatatacagatattcacacacatgcacactcacacacacatgcacatacaaatacatgcacacgcacatatgcatacgtccacacacataggcacacatgcatgcacatattcacacacttacgtagttgcacacatgtacacatgtatgcacacacaggcatacatacacatctgttagaagttctgatttaattggtccagggtggattctgggcattggtatttttcagagctcctccacaagtttgagaacccacgaaaatagtcttttctcctatttcatctttctatttcacccagggcccactatactttcagttcagtcacaaaaaaaaaatcagctcctctaacgaagaaagtgtggaaacagatagtctaagtaaagatttttggtttttctctgtcagaacagcttgagaagtctgaggagctttcaccctgtgctgcttggtgacagaactggtctctgtggcactgtgaaaggtgccctggggctctgtgagggctacagtgcataactgcagtgtggaccccaggagcagcactgttcacaacagactggaccaagggcatgctcttagcctcgctgttctctgcagattcacttcattatctttaagccacacatcagtggttgggaaggtgtcctcaattcttcaaaaattaagctgctgaccatgggcagctttgagcaatgctgacaagaaacctgaacgtcttaacaatgtgaaatttaaacacactggagtaagaacttggcaaagggttttgttttctccagaaacttaaacgtgcatatcagaaatgccttttacaaagcttttttttttttttttttttttttttttttgagacagagtctcactctgctgcccgggctctggagtgcagtggcacaatcccagttcactacaacctctgcttcccaggttcaagcagctctcctgcctgagactcctgaataattgggattacaggcacgcaccaccacacccgtctaattttcctatttttagtagagacagggtttcaccatgttagccaggctggtcttgaactcctgacctcaagtgatccacctgcatcagcctcccaaagtgctgggattacaggtgtgagccactgcacctgaccaagaaagcttttaattatggaaaatgtttaacatattcacaagtaaacaatgaaataatgaactcctagatactcactgaccagttttgacagtgacccacacacggcctgtcttgtttcatctataaccctcccacctctcttcctctcagactcttaaaataaatcccagacagcatatcaggagatgccttttgatttttgaagaatcaaggacaccttcccaaccacggatgtgtggcttaaagataataaagtgaatttggagagaagagaaggctaagagtgtgtccttggtccagtctggcgtggctacactgcattgtgacgtagtaggtgtgctcatctgtgccacatgacagcagggatggaggtgcctttgggagagaggcctgcttgcatgacggggttgcctgttccatgtagggtagttgtcagcttatgtccccacagccttcctagtggaaaaaagccattttcaaccttttagcccctggacagtgtccctacatggagagaggcagacctggcctggctgtttgatggatggcaggaattctgactacatgcaggcagtctgaagtcctgtgttttaagcaggacaacatttatggccatctagctgtactcgagaggaattaatgtgatttttttcccttaacatttccttagtaagtagatgtaaggtcttgtaaattaaaaatgctattttggttacaaaagtttacttcctggcctaactttcctgggtaaattgccctgtgcctagaggcagtgcggtgaggctttggctttctttctggttgtattaggttggtgcaaaagcaattgaggtttttgtcattacttttaatggcaaataataggataataatagaattgttcgtgcaagctctgaaagggggcgtgtactttcagatattcacttggctgatgtagtggagagctagacttgctcacgtcagaagctccttgctttgatgaagaatcttgccaggcttccctatgtcacagtgggaattggtgtgttttcaggtatattttatgtgaactgactgactttaggagctgtctagaaaggaaaggatgtacatccactctccttcaaccactttcgtaaagtggggagccatttgcatgaaaatgtgttccctgttctctagaaaagtatgccaatgagaagacaaatgagtttagggctttttttttttttttttagatggagtctcactcctgttacgcaggctggggtgcagtggcacgatctcagctcactgcgaactccacctcctgggttcaagcaattctccttcctcagcctcccgagtagctgggattacaggagtgcaccaccacccccagctaatttttgtatttttagtagagatggggttttgccatgttggccaggctggtctcgaactcctgacctcaggtgatccacccgcttcggcctcccaaagtgctaggattacaggcatgagccaccacgcccagccgccttttttttttttttttttttgagagattaaaaataataacaaatccagctggatgcggtggctcacacctataatcccagcactttgggaggctgaggcaggcagatcacctgaggtcaggagttcgagaccagcctggccaacatggtgaaaccctgtctctactaaaaatacaaaaatacaaaaaaaaaaaaaaaattagctgggcgtggtggcgtgcacctgtagttccagctacttgggaggctgaggcaggagaatcgcttgaacccgggaggcagaggttgcagtgagctgagattgcgccactgcactccagcgtgggctacaagagtgaaactctgtctcaaataataataataataataataataataataataataacaaatccaagtgagaatacaaagtgatttaatatgtacagttcattttttaaaacctttcagctgtatgttgtgactatataatagctaacatttactgggtgcctaccaggtaacaagcactgtcttacgtgcttaagatgtattaaaaattaggtacacgggaggaaatggaaatacagagtaattagggaactcccttagaccacatagggagaaagcagctggtccaggattcaaacttaggatgtctggttcccacgtacagagctactgggccatttacaggacaggggcgtgagagagtggctgcagaaaagtagaaaggaaaattagtcgtaaagagggactcgggtccaggcacagtggctcacacctgtaatcccagcacttggggaggccaaggcaggcggattatttgaggtcgggagttcaagaccagcctggccaaaatggtgaaaccctttctctactaaaaatacaaaaattagctgggcatggtgctgcatgcctatatactcaggaggctgaagcaggagaatcacttgaacccaggaggtggaggctgcagtcagccgtgatcgagccactgcactccagacagggcgacaaagcaagacaacgtgtcaaaaaaaaaagagggactctgagaaaagaaggctcggagagtcttggtatgaaacagcatgtcactctcaggcacctgggtgaaggacatcagggaagcgaccacagtcttcctggccctgctgcgcaagcagggtgtggtctgccagggtggtcctgcttgtcctttcatcaaaggccaggtggacccagctggagccagcccttccccttctgaactctagctgcctcatgcagtacttttcatctgccccagggcagaattttgtttttccatgtcaacccttgtctcctcatcttgccagatggacagtagcatgcccctcagtattgccacatacctcgcccaacacccacgtcacaaatgtcctgtgtagggtagtgtggtctgtcccaagtctgaaggaaacttgccttcacttattttcatacagtattttttaattaagtgtttactttctaagtgaattctaagtattttacacctgcctgaaggaatgccttaggttttagagacctccttgaactgtcagtttacatgtattctacctaaaagtctcagatcaaaactagccagtgatcctacgtgttactgaagctgagtgacattgattcagaagaatgaaactaaattggcctcacatttcccacttccatatggtagctttaaatttggaggatataaagaaaaccatggcacctaattgaagggatagtctcacattattagtatgaagaaatgaatcaggctggacatgctggttcacgcctgtaatcccagcactttaggaggccaaggcaggcggatcacctgaggtcaggagttcaagaccagtctggccaacatggtgaaaccccatctctagtaaaaatataaaaattagttgggtgtggtggtgggcgcctgtaattctagctacttgggaggctgaagcaggagaatcacttgaaccccggagacggaggttgcagtgagctgagatggtgccactaaccccagcctgggtgacagagtgagactccatctcaaaaacaaaaaaaaaaaagaaagaaatgagtcatcttttgaagggaaggcactggttgctgatgacacccaagcattttttagtgaagtggttttcagactacacagtaagatccttgagtagatcaaataatcagttttgtgggttgcacataacaatgtaaagaatcatccaggtgtggtggcttatgcctgtaatccctgtaccttgagaggccgaggctggtggatcgcttgaggccaggagtttgagaccagcctgggtaacatagcaagaccccatttctacaaaaattaaaaacaaaaaaaagaaaaaggattgcatcacctctatgtaagggaagtgtttttatgaaattgtgagtcatagtacaaaagaaaaaaactaccaaacatcagtaaaacacagctctagatagaatgctaactttttctgcacagttggatgattaatggctatcgtccgttttatttcactgtgctggctgccattcaagtgccaggcgctttgttcatggctggtcacctccagtaaccaccactgggatgcttcccagtccttagaaatctgggtaagaagcactaatgaagatgaatttgtttccggttctgccatattttcctctgtgggagttgttatgaatgtttttttctcataagtgatttgatgctgtaatccctcttatgtctgagaacagatgcatggccatggatcgggcaagttggttttacttatctttggggaaccggacttaacaacaggaacaaggtaggcagttaaggactctgccgtgataaagagagttagttcaggtgttgtgtggagttttattagtgagaggttttctgatgaatttcacagtgggaaattaacaaatcagttgcctgcccttggtttggaaaagcacttggtttttgctctgggttgcctgagaggctgctcttggcgccttggtatttgcagcagagagctgctgtttcctgggggttggctggggtgaagtgtaagaaatttcatatcaagtctcttagagagctttctggccgtttttaaaggaatgaactggctgagcatggtggttcatacctgtaattccagcactttgggaggccgaggcaggcagatcacttgaggtcagcagtttgagaccagcttggccaacatagtgaaaccctgtctctactaaaaatacaaaaattaggcatggtggtatgtacctataatcccagttactcaggaggctgaggcaggagaattgcttgaacctgggaggctgaggttgcagtgagccgagatcacgccactgtactgagcctgggtgacagagcaagagtctgtctcaaaaaaaataaaaataggccgggtacgctgtctcatgcctgtaatcccagcactttgggaggccaaggtaggtgaatcacctgaagtcaggagttcaagaccagcctggccaacatggtgaaaccccgtctctacaaaaataaaaattagctgggcatgatggcgagtgcctataatctcagctactcgggagactgaggtgagagaatcgcttgaacccaggaggcggaggttgcagtgagccgagatcataccactgcactccagcctgagtgacagagtgagagtctgtctcaaaaaaataggccaagcgtggtggttcacgcctgtaatcccaacactttgggaggccgaggtgggcaaatcacctgaggtcaggagttcaagaccagcctgaccaacatggtgaaaccccatgtctacaaaaatacaaaaattagctgggcatgatgctgggtgcccataatcccagctactcgggaggctgagacgagagaatcgcttgaacctgggaggcggaggttgcagttagcagaggtcgcgccattgcactccagcctgggtgacagagtgagactccgtctcaaaaataaataaataaataaaatgagggatgaactgatataaagaggtaaatggagctttttgcaaactgctggttgtaaaaaatcaaattaatttttcacagttccccaaatcctatttaaaacaactacctaggaaacttttaaaagttgggcattagtgaagccaaattattttgcttatcttcttatgacaagtttatgagtaagttttccttgggttttgtggtgaatcagtgtgtgtagtatggataattatacagttagctgttcttaactatgtattggacatgtctttaaatacacagcagaaattgtgccacaagggagtatgatgtccagtccccactagggtcctggtccttcgtgtgtctgcagtgtgagccttcttccagggcaggatcctgacagtcacaacaaaacagcccaaatcccactcacaccagaggctgatggcagaacccttcagaaaaaaagatttgatgatggaagaagagtaagaaaatgtgtatctaaccattcatgagaaagtacaggatagctcatttcaataggaatctaaatattactggaccaagagagttatacagtttccctggaacactgtgcatgtgacactcaagaagaattctgtatcagtgttagtcattgcctcagcccacacgtgagtgccagcagtgccaggccatgtgttggaccccagggatacggcggtgagcgcactaggcctggcctgccctcccggagctcacagttgaggctcatcaacctgccaacaaacatgctgtcagtacctcctttcaaaactaacgtgtcataaagcagacaagatcttagaatagtttaaatcatcccagctggaaaaagaaggttgcatggtatttgtgagttttgagaaaggagtttccatttggttgaatctgtaaacttaaaccactcaacaaacattcttttttaaaaaggtatcatatttcttctttccttgaccctgtgatgtttatttttgttgctcacattggactttcaggctgatggcagcagtgctggctgcataaacagatttttccacttcagtgaaatcagcagagcttgtttcagttgctgcatggatggtcagcgtcgttccttctcatgtcctcctagcatccatcctcagcattgccataaaaccttcctggtgtgtagttttctaaaaaaatattatctagcatatacatttcactcagaaatacttcctttatggcagttccttagccaaggccgtgctttattcatacttcaggatcagctaagccaaaccacggtggcagtgaggagtgggtcctttggtttgttgaccctggttgtcagggctgtctttggctcatgtgtctctgtattgagatgtggtttagcctgagagagtggccggctgcaatgctaattgtcctccctggtttgctggcatctgtgggagaacaagaagaaaaggccttgggtttgggagagccctgtcatccatctggagtgacctgggagtgacctgcgcgcctttccccctgcccccgactcatattaccctgttcttgttctttttaaaaatacttttatctgtttttcctacattctttggcattttaatctccctcccttcctttcctccttccttccttccctctctttgtttctctctccttcttcctcctcctcctcttcctcctcttctcttcctcctcttcttcttcttctttcttcttcttttgttttcaagttgggggtcttgctctgttgcccaggctggagtacagtggtgcaatcatagctcactgcagcctcaatctcctgggctcaagcgatcctcccatcttagcctcttgagtagctgggaccacaggcatgtgtggtcacacctggctaattcctttttaaattgttttgtagagacggggtcttgctgtgttgcccaggatggcctcaaactccaggcctcaagtgatcctcctgcctcaggctccttaagtgctgggattgcaggctcgagccgctgcacctggcccttattttatttttaagtgatctgtacaaatttattgggaggacaagaaaaaggacatttcagagagtaaataaagagaacgttccaacataaacgggaaagggatgtagataacatggaactctgtcaagccctttaaacaaaggccaggactttctaccttgctgtgtgcagccttccaagtaaccctaccattgcctttcctggccgtttggatcttctctacagaaaattggactttttccacagactctggaatcagcaaacactaatttttacttttataaggtataatcattaatattccctcatgcacattagtcatagtccaagaaatgagattattattaggcatcgagccaggataagtactgagccaggacagctgtcaggtccaattgggcagaacatgcaaggctgtaactggtgagcagctgttggtaacctgggaggcagcctgcttcatggtcaccatagcggatgggcctaactcacctaagcaggcaagcacatgagaaccttcatatacaagaacctaccccagcaccagggtggcatgcccatgagcacagggatgttcatctgctctgtcaccactgcatccccagtgcttagaacagagccttacactgcttggtattcctcagcactgaatgaaggaaatattacatcagagaccatgaagttactgagttggaaaaggtctcaataccttaactaattgctttgcaatagaaacaagtacttggagcattttctcttcccacctccttacctctcctctttcatccatgttatctttgtaactttaggtaaaaagctaatctattttagcctcagtttgttcatctttgaaatgtggttaggaacccttatttcctaggaggtggggggggggtgtgattcacccaatcacccacagcttctcgcacagctcccgccctgtgctagcgctgttcattccatcttcctctctttctgctcgttcccttaaaaaatctgcaaagcgcttataccatacttgtttaccatccaacaaagccatgaatagcattttctaggagaaaagaatcataagataggaacactactaggtagaaaatttgactagaaaaggtcctagtgaatgaaacacctggtaataaatacagtcaagtgccgcataacgatgtttcaggcaaccacgggccacatgtatgatgatggtcccatgagattgtgatggagctggaaaattcctattagctaatggctttgtagctgtaacttcatagtccaactcttacttacgcatgtgtggtttatgttggtgtaaacaaacctacagcactgggcactgctggtcttttaaagtgtccagtaatgtcctaggccttgacattccctcaccactcactcactcactcaccctccacaacttccagtccctacaggctccattcatgttaagtgtcctatatagatatgcattttttttaatcttttatatgatatttttacattatcttttctatgtttagagatgtttagataaacactattctgttacagttgcctacagtattcactacaatctcaggctgtgcaacaggtgtttgaataacatgcttcatttaagatcattttgttatagcgttgatgagaaaaaaaaatgattcctggccagggccactgtgtggagtttgcacattctccctctgtatggtaaaattggttttgttagacatcattttgcttaaacttgcaggtttccaagaacataatgatgatgttaagtgaggactgtactggtttgtagccaggaacaatatgctataccatctagcctaggtgtgtagtgggctgtagcatctaggtttgtgtaagtacactctatgatgttcacacaacaacgaaatcacctaatgatgaatttctcaaaagatatccccatatttaaggaatgcatgactgtattaatacattctatcatttttgaaactctgttaagtctacaacagccagctggtattttgcccctatattttccagagtcaggaaagaagcagaatagattttttaaattcctaggccaaggcaaagtctccaccagtagcatgtgatgagaacactgttcagtcatccatcacatggtgtcactcagccatgcaaaattaccattttctcagagaaagtgttgctggacctgaggaactgtaaagtatattttctgctttttagtttcctagctctctgccacttgtgggtacagtgaccagtttaaaaacaggagtttcctagcatgagaaatatatgtctagatcatttgtagcaaagtatcagagtccagatttcatggaggtctaaggcctgtggattgggtggaggggacctgcggatcccaactttcatccagaagttgatacatactcaccttctttagtagctagtttcagtttttgattcaggacaagtgaggaaaagcaggtatttcaaaatactgccaagaaagagatgagaggaggtagaaacggccatggtcctgatataagatgatttgatggttaattggcatgcatttctgcaaaaatcaacatgccaccatcactatgaggtagctaccattaccatgttgatatatgtgtgaacaaaagttttctggaaaggaatttaaaaagactttactccaatgagcagtttgcaaaccagggagctgcagccttcaatgtaaactgaaggtacattccagagaatctaaggagtgtttgtgttttataaagtttctgtccatgttctcactcaggtccatttatgcaaatgaaggagtcaaacttgcttagttctgattggttgatgtttgctgagctctgattggtcaacataagtcagaccttatgattggttcaggcagggtaaacaggaacaggcagctatgaaagtccccaagttaagcagaggtatgggttttccaggaattcaaagtacatgtgtgacgactagtcagcaaatggccacttggttctaatttcaactaaggcccagttggctgctcaggattcatcttgagggattggctcttccagagttcacagtgtctttgacagtgctttttttactgatgtaattttatgaaaacacagtcatgttatttgcactatttgattttttgtttgtttgttccggctttgtttggaaaacttccttgaatattcagcactcttggctcttcatgtttgggagtgatgtactaaaagctgattggaaggactatagggtggggcctgtagagtgggggctttgctgtagggtgaccaggtggaggactgggggtttgtccctggggcctttcggttttaccagaagagatcttcagatctgcagggtgtgtgggggttggcaggggaggagagttgaagccagtgtggttgatttagtacttccatgctcacttaactctctgtgttattcctttgtgggttttttgtttgtttgtttgtttgtttgtttgtttttttgacagagtctagctccatggcctactctggagtgcagtggtgcgatcttggctcactgcgacctctgcctcccagattcaaccgattctcgtgcctcagcctcccgagtagctgggatttcaggcacacaccaccatgcccggctcatttttgtatttttagtagagacagggtttcatcatgttggccaggctggtctcgaacacctgacctcaggcagtctgtccacctcgccctcccaaagtgctgggattacaggcatgagccaccacgcctggcccttctgtgttatttccttgctgtctgctctcactgtgttgtagtctgatttggtgttggggcgggggcctggggacacctaaggacccaggtgatctcatatagacctccagggaggcctctttttccacccatacctcatcctcactgccctgtgggctcacagcatgtacttggtgtattgtcgtctgttatgtggaggtagcagctgttcctccatctggtttctgtattttaaaaggtattgaattttcttcttatgctgtgattgttatgtaacagctatgatgaaaaattaagaatagtaagagtgatttggtgtggctaatgcaccacatatacctggaaatcccacatatatgtgtttgttacctacatttttgttgttgtgtttttacttaacagtctgttaattgttttagcttacccttaggataagtataaattcccagacatgacttgctgggcccaaagagtatgggaattgtttgggaccaatgatccagcagcaaattggaaccagtttgcaggaatagtttctgcaaagcttctgagaggagaggagaggagcaggtgtcggggagagatggctgttcagcactttgcaaagtgctccaaggctccgggttgaatgtgcagcatgcttgctcctgccttccaagagctgaccacgtggtgggggagccaaggcacaaaagagctgtacctttgcacatttgcttctttattcattcattcatttgttcgtttgttcattcatcactcaccacacgtgactgagcggttcctatttgccagacacagtgaatatgcactcagttctggcccaaatcgctggcaggacaagggggcaagactgtgaagaaagagcatgggcagtgggacgaacaacctgggccttgttgtactgttaaaacactatacaacgtgattttgcaacgtgcttttttcattcattatgggttttgtgatttcctggtgatggacatttagatagtttccagttttcccctacagacataagtacagtgagtattcttttttatgtctcctcttgcaaaggtggggaacttatctagggggtggaagtggaatcttggttgtaggatttcagcatctttaactttactagatatggtcaaaatattctcctgtgtgattgtaccaatttacacacctttcctcagtttatcaaaatgcagcatctctctaactttgccaacacttgctgttgtcagatatttaaagtatttgtcaatctaatgggtgtgaagtgctctcttattttttcagtgaagttctatgattgctggtgacattggacttcttgtgactatttaagttttgaattcagactttaccactgcctttatgaacttgggaaatgttcataaatgttcataatgttcaggagaccaaaccagtctcctggtttggtgaaacataaatacctacatttagcgttattatgagaaggagggaccacacgcatggctcctggctgtttgtgtctcagtctgaagtcattctaacaacaccacccagcgggctgcccctccccactgaggagaccccaccccaccccacgcccaaggctgtagtctggagcagcaagagccaaagaggtcctgtgagagcagggggtgcctcttgagaaccccagcaggagtcccaggagagccgcccacccctggatgcggtgcccgagtgtctgtcctacagtagtagctggcaatgcagcagcgagcaccactgcgcctctgtgccatcctactggcctgtcagctcctcgtccacctctgccctcatacctggctccccacggtggagccagagtgggccttttaaaacagaagtcagggctgggtacggtggctcacgcctgtgatcccaacactttgggaggctgaggtcggtggatcacttgaggtcaggagtttgagaccagcctggacaacatggcaaaccctgtctctactaaaaatacaaaaattagtcggttgtgatgattcgcatctgtaattccagctactcaggaggctgaggcaggaggatcgcttgaaccgggaaggtggaggctgcagtgagccaagattgcgccactgcactccagcctggggccacagagcaagactccatctcaaaaaaaaaaaaaaaatatatatatatatatatatatatactatatatatatactatatatatatatatatacatactatatatatatatatactatatatatatatacacactatatatatatacacacactatatatatatatatatatacactatatatatatatacacactatatatatatatactatatatatatatatatatatatatatatatatatatatatactatatatatatatccatcccctacgactaactactccttcccttatccttggctctgattggaagaaacctgattattggccgagcctccttatatcttctcagtgcctggaaaacaggctgtggtctgtagacacaatttttggcatttagaaagaaaatgcctgttggtttataatcagtatggaggatgcatgtcctgacattccactgtcagaaacatggactaaaagaagaaattccaattggtagggtaacagccaagttttaaacaaaatggttggattttaaagcattgttggaaaatggaaacttgttacagagattctgagcctttggaaatataacttaaaaattaaacccataatatgtatatatttcaaagttacactgtaactttttcagaaaaatacataaaaactgcatagccagggaatttcagtttttgctaccatacttcataactaaaatatttgtatactttaccgaattaccttgtcagtgactctttgagggcactttgtgaaagtagcagattactgtcttccttcttgggtgaacctataatttgccagatcttccaacctacttgacagcatttaaaaaataaccacagggaagcaagctctgttcagtctgcatccaaatgtccctttccctgggcactcacgggctgcctgtccccagcagagcgagctgtgggaggcacggagagccccagagcccccaaacatgcacagctactctcttaaaaagtcccaaacacacacagctactctcctaaagccccacagtcggagacaggtgtgtgcagtgaggcacgcctatgtgccattgtcgagtaagtggatctttttgatggagacagcggcagaattttccaggcagcctttgtctggaagtgaagagcagagtcttcacacatattcagcctacttaatttcaggagccaggagtggcttggagcccaaacagaaaaagtctgctcttccggagtcacatttaatctgttcatgcttcagctctgatgatctggcttattttttggctattaatgctcaattgtggcacaagttagtcctttataaactcagtctcatcatagcatataacttaggtgccacaacgagtctccgcagggctaagctggctgtctgctcacttttttaagggatgtacacagtgggcgctggggaccagggccagagagtggccacctgttagagctgcatgtgtgtcttgggcctggtcttctttctctgctcactaatgacagctgtcccagcctcttgcaggctctggcccaccaccttgcttgctgtgattttttttttttttcctcacacatgataagctgaggcagaaagtgaatcctttcctttttccttttctttctttctttttttttgagatgcagttttgctcttgttgcccaggctggggtgcaatggcatgatattggcccaccgcaacctctgccttccgggttccagcgattctcctgcctcagcctcccgagtagctgggattacagacatgcgccaccactcgattacagacatgcgccaccactcccggctaattttgtatttttagtagagacggggtttctccatgtcagtcaggctggtcttgaactcctgacctcaggtgatccaccaacctcggcctcccaaagtactgggattaataggcgtaagccaccgcgcctggcctccgttttttttttttttttttttaaatagagtaggggtctcactctgtcacccaggctggagtgcagtggcacaatcatagttcactgcagcctccaactcctggcctcatgtgttcctcctgccttggcctcccaaagcactgggattacaggttttcctttcctttatgaagacctttttcctcctaaggtagtgttcccagcaagagtgcgaattaaaaccccaactaattcttttcttaattctgctgctagagctccagcagacagggctttgtcttacccatatcttattactcttcctgtcagaaaaacactggaagttcagaatgaagcttgcagaggaacttggcaagcccttttttgaccctggacctgaacctaccttggaaggcagagaaagccccacttctgcctgggtcagtgtagccctggccagcatgagccctgcccagtaggagtgccagaggccggctctgggtcccagcatccctctggcttacgctacaccctgtcaaggtcaagtgattttctttctctgatttctctgtgtgcaatcttttctgttcaccagacagtttttcgagcctccttttgagttctaccccagccccagccctgaccatcttcagctcattcttttaaagtgggtttctctctaacttagtgttgggctgccttttttgtgttgggaaaacatgggcctctacctagtcatgacaccaagccctcttgactaatggttcccagatttttcctagaattgcatcttctgtgggaccaacatggtccttcccatgaagtgccccattcctgtgctctctgctgaaggcttcctggctatgctgctttccccaggcatttagaacgccggggctggtctctgtcccttggagtcatgctcatggcctggcacatgatgactccccctgtggattttgtgtaattacttattttcctggtgacttgtacaaaccaaattttagtgtacctgttgtccttaaaaacagcaatgtcttggttggtgtaggttttagaaggagacagaaaaatctttcctcatgaagctcttttgcagtctcacattgggcttggctctcagaccccttggattcgggatactgttgaacagccccatggtgctattagagcaaagcgcttcctgccaaagcagatgtgtgcctgccaggttggaggcagggggccaggaagcccactgcattgctggtttcctacgcccagaacagcatgctgtgtgcactcgcaagttcatgctgacacacacgtgtgctggtcagtgcccagtaatgctatacaaaacactaggactgaacaggatgtatactgttaaaatttgattctcccttgcattacagaagcttttttttttttttttgagacagtgtttcgctcttgttgcccaggctagagtgcaatggcgcaatctcagctcactgcaacctccacctcctgggttcaagcggttctcttgcctcagcctcccgagtagctgggattacaggtatgcaccaccatgcccagctaattttgtatgtttaacagagacggggtttcaccatgttggtcaggctggtctcaaatcctgacctcaggtgatccacctgccttagcttcccaaagtgctgggttggtgaggcgtgagccactgcacccagccaccgttacagaagcattttaaagtgcttttgaatgttatattcttttgtatgttatattcattttaaagttctttgtgtgctgctttttaaaattggcgtatgtttttctcacagggagatttgacctagtaatgatagccatagctaagagtttagcacactttaagaacaaaagcatttaaacattaataaaagtaattttgtagtcaaatattaacccaaccaattatttactttagggccttaaaagatataagattatttaaaaagacactcctggccaggcgcagtggctcatgcctgtactcccagcactttgggaggctgagatgcacagagtgcttgagcccaggagagaccagcctaggcaacatggtgaaaccctctctctaccaaaaagacaaaaattaggcctggtatggtggctctcgcatgtaatcccagcactttgggaggccgaggtggctggatcacttgagatcaggagatcaagaccagcctggtcaacatggtgaaaccccatctctactaaaaatacaaaaattagccgggtgtggtggcgaggcacctgtaatcccagctccttgagaggctgaggcgggaggactgcttgagcccaggaggtggaagttgcattgagccaagattgtgtcactgcactccagcctgggcaacagagcaagactctgtctttaaaaaaaaaaaaaggaaaaaaaagaaagacagacaaaaattagttgtgtgtggtggcgcacctgtagtcccagctactcaggaggctgaggtaggaggatcggttggacctaggaggcagggtttgcagtgaccagagattgggccactgcactccagcccgaactctgagcgatagagcaagacccctctcaaaaataataataataaatttaaaaatacatatttatttaggttctcaaaattcactgatcacaccagcaatcaataatggaacagtctcattttttgaagaattattatttctaagcattttgttaaatctttgtgttaattattgtcatcttacctatttgaaaatttaccttttcagaaaacttgatgatcttaacagcaattgagtttatttggacaaaaactgaggagaccaaaccattcaaattttaagataaaataggccaggtgcagtgactcatgcctataatcccaacactttgggaagctgaggtggggaggtttgcttgaggccaggagtttgagaccagcctaggcaatatagtgggaccctttctctaaaaatgaaaaagaaattaaagaataaagttagccaggtgtgattgcctgcacctgtaatcctagctacttgggaggccgaggcaggaagtttgagcccaggagttagaggctggagtgagctttgattgcaccactgtacttcagcctgggtgacagagcaagaccctgtctctaaaaaataaattataaattaaaacaaaaaaatagccaggcaccatggctcacacctgtaatcccagcagtttgggaggctgaggcaggcagattgcttgagctcaggagttccagaccatcctgggcaacatggcgaaaccccatctctactaaaaaatacagaaaattagctgggtgtggtggtaacgcacctgtagtcccaactactctggaggctgaagtgggagaatcacctgagcctgggaagtcaaggctgcagtgagctgttttcacaccactgcactccagcctgtgcaacaagagtgagaccctgtctcaaaaaaaaaaaaaaaaagttaattaattagttagttaattttttaaaagatgggcatatttgtccagattatacatagcagacagcaaagtagaaccagttatcaattatctactgttgtgtaaccaaccatcttagaccatcccagaatttttagtgacttaaaaataatggctttttggccgggcgcagtggctcacacgtgtaatcccagcactttaggaggccaaggtgggcggatcttgaggtcaggagatcgagaccatcttagctaacatggtgaaaccccgtctctactaaaaatacaaaaaattagccgggcatggtggtgggcacctgtggtcccagctactcaggaggctgaggcaggagaatggcgtgaacccaggaggcggagcttgcagtgagccgagatagtgccactgcactccagcctgggcgacagagcgagactccgcctcaaaaaaaaatggatttttaaaatttgttattattttattattactatttttttgagacggagtctcactctgtcgcccaggctggagtgcaggggcgctgtctcggctcaccgcaacctccatctgccaggttcaagcaattcttctgccttagcctctggagtaactgggactacaggcacatgccagtgaaataatggcttattatttcttatggctctgtgggttggctgtgctcagctgggcagttcttctgctccagtggtatctgctggggttccatgtagctcattccactgggaactcagctggggctgaatacccaagagggcttcactcatgggttagaactgcaacacagttaactggatctgtctccaaccatggtgcgatctgaggactgaaaatggaagtagccagccttcttgagggtgaggctcagaactggcacagcagcacttctgctcattccattgatagagaaaatcacaggccagccaatattcaaggggaggggaagtagattccgcttcacactgggggctgcagcccgtacatacagggatgggagaaattttttagtgcccattttttggtagcactgttacacattaatagaaatataggatccaggacccctgaaaccatgccatgtgtgtgtactaatagggaactttgagtatattaagtttctgtggaatgtgcttacctctgttcacctatctccattgtgacaaaagtcttattttagcaaacattcctcaaaatcctggaattttacagataaaaggaactttgggattagcttgtatattcttatcttgccattttattggacacaactgtgatctggagaatttttgtgatctgtccacaattatgtagctagatagtacaggcagttttgttttaatggagtctgatacatgtgtaagcatcttattgtcatgctctctttaacaaatcgaaattactgttctttcaacataaaattaagtcatactttaatttttttcatgttctaatcaagcccttgttcataggcataactgatttgtgtacatagttactaagagacataacattttatacaatcagcattttttcatgttgtttacactattgaaagttgcctgttttgtttttgcttatttttgctacataccatctagaacagtggtagatttgttagagttttacttatagaaagtattatttctggctgtggtaagtgtattctaaggactatattaattataattatagtttagtagtggccatgtggcctctaactcccatcccacactttcctatttgaggggctgatatattatacctaaatctgacagacatcattatggaaatcagttttttaaaactgaattattttagcctgaggataaatttcaagaagtaaaatcattaaatcgggataaaaaaaacttaataacttttgataataaatattcacccctgaatatttttggtttatacatgaccaagaatagttttaccagcacatttatctttattattattattattattattatgacagagtcttgctctgtcacccaggctggagtacagtggtgcaatctcggctcattgcaacctccacctcctgggttgaagtgattctcctgcctcagcctcctgagtagctggggctacaggcgcatgctaccactcccggctaattttttatatttttagtagagacagggtttcaccatgttagccaggatggtctcgatctcctaactttgtgatctgcccgcctcggcttcccaaagtgttgggattacaggcgtgagccaccacgcccggcctatctttataattttttattttattttggtgctaacaatagttgtaaaatgctctttattttatcagtgtttctttgttttgttttgtttttgatggagacttgctctgctgcgtgatcttgactcactgcaacctccgcctcccaggttcaagtcattcttctgcctcagcctccctagtagctgggactatataggtgtgtgccaccacgcctggctatttttttttttttttttgtatgtttagtagagatgaggtttcaccacattgtccaggctggtctcgtgatcattggcaaggccaaggatttttcatgttcattttattttataacaaatttaaggccaggcaccctagctcatgtctgtaatcctagcattttaggaggctgaggcaggaggatggcttggcctccggagtttgagaccagcctgggttacagtgagagcccatctctacaaaaaaattttttaaaaaattagccaagcatactggctcctgactacaggaggctgagatgggaggattgcttaagccgggcagtgccaggctgcaatgagccctgatcgagccactgtactccagcatgggtgacagagcaagaccctgtcaaaaaaaaagaaaaagaaaaagtgctcgcttctgcagcagatatgaaaattggaacgatacagagattagcatggcccttaaaaatacacaaaacaaaaacaaaacattatgccaaatttcttcttcattcgtttcaaaaagacgtatggtttgtacctgtatgtgccgagcaggtgtcttccgggcgtgtgtctggtttaccaaggttcgggggcctgcggcgccaccagcggtcggaggcggccacggctggggctggagcttctgctgcatccgcgcaaggtggcgactcattttcttcaagcacacagacatttaaactccaaaggccactacttccatttgtcctccacctgttttccagtcataattggctcgcacacggcacgtgctgcgcctgcccaaggtcaccggggcccctgcctcgcgtggacaaggttgtggaccaggtcgccagaacccccgccctgcgtgcacaaggtcgcggggatccctgtcctgcgtggacaaggtcgtggaaaaggtcaccagggcccttgcgccgtgtgcgcaaggtcaccgggactcctaccctgcgtggacaacgtcgccagggcccccgccccgcgtgcacaaggtcgtggacaatgtcgcagggcccccacccggcgtgcacaatgtcgctgcggcccccgccccgtgtggacaaggtcacggggctctgccccaccagcccaaggttgtcgggccccgccccgcctcgccccgcattgacaaggccttggggccccacctgcccaagatcgccgggagcgccgcgctcaggggaggggcacgcaatggtggggcggttagaggagccctgggcccggagggcctcattcttccaggggcctttccgtgggggtggggttggaacaccctttggaaattccagctcctcggctcctgtgttctcataaaaaaatctaggcctttgggtcagagattcttttgaagaccaccctgctggcaatcctccaagcaagcacaggatcccgccagagacagtgcagcctcctctgccagccaactggcccctctcatcctcttctctccctcagtctttgttttttcttaatttaattaattaattaatttttgtttgtttgtttgagacagggtctcttgctctgtctcccaggctggagtgcagtggcatgatctcagctcactgcagcctccacctcccaggttcaaagtgattcctgcctcagcctcccatgaagctggaactacaggcacccaccaccatgcccagctaattttctcactttttacaaacatgcgggtcttgcccaggctggtcttgaactcctggcctcaagcgatcctaccttggcctcccaaagccctgggattacaggcgtcagctacaacttaagtggaagttacctgagaaagcctgagagacaggcagacacagacagaggcccacgcagacacgatagggccagagtgctccgtttctactttttcagccaaacctcatagttggaatgttaaaactttaggatatggttttgctaaggcttgaaaaatgcttccttaccaggaagggctgagtgggggaggatctgcataggaaattccttccctcatacataataattgtcactgcatttaaattacttgcattcacatggcaatgcacgtgaaatacttctgctgcttagacattgcaagcccagctcctgccttgctaagagctgagcggtagattgaaggagtgtcttccagttcccacccgtcctcgtaagccctgtgcttagtagaaggggaccaagccaagagagcagagggtgtgtcaggagcccatgctaggctgtctggcagctggtcagcagctggagagctgggtgaggccagcttccccgagggacagcagagaagatcattaaatggtgatgtacctgcaacagaggcctggaccatcccatggggaggtttggagctggggtgtggtccttgcaattgagaggaccagcctcaagatactggcagggcctgatactggcaggtgtcccacccctcagccacctcgccgttttgttaaagtgcctcttttgcagtcctttctatatcagatagcatatgggcaaatctcacattttccaggcttcgtagtggttaggtccagttttaagcgaacatcaatttgttgacaaaatgtaagaggagaaatctcttgggaaagatacctaaggtacagatgttcaaaactgctttattcatatgtaattcacacacctaaagtggagttttacaagagctgtcagtagcagcagtaaaccagtgaaacctcagtttgtcttgcccttctcagtccctccccaatctcttagttttagccatgaggcagaaaacctcttgaggagctctgctttaatggagtgggaagaattccttctatctggtccagggccaccaccccaagctgagactagcccactgcagtgcatgtcaccgctctccagaagagacgaggctgccaggcccctcggggtgtctgtcctttgtgccatagtatttagccctactagcttctattctacagccaatctgacaaaataatttttcatttaatatttatgaatctgcaagaatagcccagagggtagcagataagggctccaggtaagagcccgtcagactcttattttgtaaccattgtggctccccaaactgtgaggcatagagtttatgccatgtcaggttttgctgaatttgatatggagtgtgaataatagtatcagttctgccttcaaagtatccagaatcttctatcagcccaggcacggtggctcacacctataatcccagcaccttgggaagctgaggcaggtggatcacctgaggtcaggagttcgagaccagcctggccaacatggcaaaacgccacctctactaaaaatacaaaaattagccaggtatggtggtggttcatgcatgtaatcccagctattcgggaagctgaggcaggagaattgtttgaatctgggagatgaaatttcagtgagccaatattacgccactgtactccaccctgggggacagaacgagcctctgtctcaaaaaaaaaaaaaaaaaaatcttctaccactctaatgtaggtagaaaaaaaatgcttctggactggatgtgagatgtgaatgaaatctcaaagtcaagatgcttccaaggttgggagccctgagagaactggtaagttagaggcaggagattgggttttgcacatgttgagtcatcttactcttgcagcaggtggcatggagtggtcactgatgaaggaagtgttaaacactgcaggtatcttgtgccaaatctggtgctcatatgatggcttcaactccagcattgagctctgtctagaagagaaggcttaatttatgggcgtggtaaccaagttcaatggattagcatccttcttctatgagacattagcccaatcctaaattaagctttcctaaattaagctttcttgagggttttaggagaaaaatttagtgtgtgagggattttcttgttgcacgtggctaggtgactgacacaaagtcatcaaagtcttgttagcctaccacattactctgtaaataattagtaattggtaaatagtgcatgatacacacattcaaagagcattaagattttgtgaacttctgtagaagaggctgtcctgaagaatggcacgtgtgcaaactagataatggagtaaaacttggaagttgctgctgttgataatgttgatttgaaattccctttagcctgtgccttggtgcatctctgctgtgtaccttatctccatcttccacacaccagggcagcctgcccagtggaacagacagtatcttcttactccctgcttgcagctctttcttcctttcatctatcctatgtcacagtctaactcagtcactcactcaatcattcattgaacagatatctgctgatctctttctacacgctagacaccagaacacatacctgaactgtcctcgccttcagttggcttgcagctgcactcttgctttggggcagggctgctcaccctttccacatcttggcatgcatagacgtggataatgtttacacagcagcctgaggtaagctggaagagactggaggtgtctattgaggcttggggaaaagaactcattacatttctttgtataattattgtaagaagaatacacagtaaaacattagagccattaaatatcaaacatgcataaaatctacaattacagtttttatgtttttttttcccagaaacacataagatacctttgtgaactgtaacagctaacccttaagtgatgctgatgcccaagcatgacatctcctttcatccctagagcaacctattagccttatttcccagatgaggaaacgggcactcaaagtaaggaaatgatttgctgaaagttacacagctgctaagcagcagaggggaggggtgaacctaggtgtgtggcctccctatctgcgccctgtaccactgcgccatcctgccatcttttggaatagccacctacgattctagataaggacccttaaatgatgatctttatacattcttcttttaaaaaatattttattctatttttttttttttttgagacacattcttactttgttgcccagcctgccctacttcctggactcaagcaatcctcctgcctcaacctcttcagtagctgggattacaggcatgcgccatcaacacccagctatttttgtgtagagacggggtctcactgtgttgcccagtctggcctcaaactcccgggctcaagcagtcttcctgcctcagtctcccaaagtgttgggattataggcgtgagccaccacatccagcttggtctccatacatgcttaagaaaggaaggtgagtggccaagctcctcggccaggcttcagctgcatctctctgacacactcctcccgcatcctggctccgacctcttgccattcccccgactgtgcacttgtcttcactctgtgactctgcatgtactttgtgcccagaggccatgtatttctgatggatttagaagtggattcccatttccttcagtgtttaaaacatagctctatgtatatgtacagtagcatcttctgagatttaatgtacagataggaagtacttacttgctaaagaagggttgatggacagataacaagggcaagcctcaaaggacatgggttatttgaagggtttatttataaacaagccggctcatgagtacggttcacttttaggacttgaaactcccttctgaacatgagtcttcacttgtggtctccttgctgatttttctgagttcctagatttgatgcacaataaacatacacatcttgagtagtgggtgctccataaacagggagggaatttgagaacatccacattgacctagtctgtcctggagctgtcccttccttggcagtcaacaggtactgggttaatgagcacaggctggtgattcaccctgcaggagacagagcgttggtcacgtttcagatgaagcaattgaacggttagtgctgatggaaaggcttgtggttagagtcagccccaattggcacatttttttaatgggcgccaaaagctccagggtgatcccacaaagatgtggtcttatatcgtgtcttcctccaagctgttgagtcttcgtagacgtgatctcatcgcatagctcccgaagtaggcggtggtgggagtcttatctcctgtcccaggtggggtcaggaagcacttcccttctgaaccaccgctgccttctctctgcaactcttccaggttgtaaacacttgccctttctggtagtccaggcgccactttaacaaacaggtctgttcttattaccattttccaatctgtcacttcatgtcccatgtcccacatgggcaggcaacatggcctgcccatgtggcggcacctccccaggccttccacctcgtgctcctctgcagccccttgcctgtccctgccatcttgccatgcccacgcctgcattgctaagaacacagtttacagcccgtgttttttgtgctgccattctgctggcatacggccaggactggaaagcttgattcagtattagaccatcatatatggacaataagtgcttaatttgttctaggcactgtgttaagggggcagaagcaaccatgagtaacatggattcaggccctgccaggttcttcttgtcctaagggaaccacagacacacagctgagtgcgattcagatcatgggcaccacaatgccctatccagaggtgggggacactcagtgctgcatctctctctgcggagtggctctgtgaccatggccaggcttcctgctgcagagcagccctgcacggcctcccccactgtccggggtctttctgtatctccacccccccattttttttttttttttttttttttttggagatggagtcacactttgtcgccaggctggagtgcagtggcgtgatctcggctcactgcagcctccacctcccaggtttcaagcaattcacctgcctcagcctcctgagtagctggaactacaggcacacaccaccatacccagctaatttttgtatttttagcagagacgggatttcaccatgttggccaggatggtctcgatctcttgacctcttgatccacctgcctcggcctcccaaagtgctgggattacaggcgtgagccaccacgcccagccatctccacccctttcttctctgctgtctgggtaactgtggactcctttccggagctccccgttctacattttcagtttcctcctgcctggttgccctcctcgttgaccttcagagtgctcagcctttcttcttctgctgaagccctttttgtggcctttgcctgtttttgcccttgtcccacagccagcctcaacggtgttcttttctctctgctcaccctccctgtttgcctacagctctgcggagctgtcctgaaaggtgaagggggcgccttcatcagagcctcaccgccccgcgccactgggctgcatctcttcggtaccctcctgcctattctgtctcccccatctgagtgcctccagctctgcacccacagccgcccccagcctgacctgctgatgccgtatgtcccagtttgaaagcttcctcgaatgcctgcagacaggagcaaaaccctggagagcctggcccccatctgtgggtccatccccccatctccacctacccttgcgtgctgctgccatgggcccatctttccccaggcttctgctctggctgtcccatctgccaggaatgccttttctctcccagggctctccacctgcccaaagtctggaacagctagccatgccaccacctcatctttcgggtggaaggaggctttctcctgtggccctcatccattttacctgccctctcccgtggtggccaccagtccctgtgttcttcccacaagcagtttgagctacctgtcctggacctgtgtggctccatgggcccctgttttgtctcctttctttcttctacgagtcagatctctaagggccagtcctccgctgctatagccagcatggggcattgtaaacagtaggcgtgtaatatatgactcttcggcagctgcaccctctccctggggacaggtttcctagtcccagagttagcctggaggtgagctgaggttaaagccaggttccctgactcccacagttcttccccttaaatgtttctagttttaggttcatcctgaactcaccagtccaaccacaaaagttttctgaggagaagcagaatttaagtctctttcaggcccatcatcaaaattcccatatgtccttgacataaggctaaatagtctatggtgtggcttgtgctaggcttttgccatcaggtacctgcagggcacacagccacctgcactcattctgagggtctcctgcagcatatcgcaggttctcagcagtacagaggcgaagtgtcccagcacagtccagcacggagtggggatgggagtctttggtggctttgttttaggatgacatgcacttacctctcctttacttccctcccaggagatggctggccgagctctcaagcagactggcagcaggagcatcgaggccgccctggagtacatcagcaagatgggctacctggacccgaggaatgagcagattgtgcgggtcattaagcagacctccccaggtgagcccaggcctgcagcatagtgggcaaagatggtttgtggcttaaggacaacaaaaccacgtgcagaggggtccaacctggcctggcctggccagagccagtctcctggcacattgcctcattcagttaacaggcaagctgagcctgccctgccctgacagagtcaggccctggcgggagcagccccaagtggtagaccgtgggacacgcctggcgcttgccccatccagccttgtctgaaattaccttagtacttcctacctaggggaaggtgtgtgcttgttttatgaaagatcaaaaaagtcagcaaagcgggcgtaaaaatggtcttttcactttctcttgggcctgtggagggatctttgacaagggtggcttctttcctcaattctaaaacacacctctctcacatcgtagcttctgagagtgggggttcaatggcaggcagtgtgggcagagcgctgggcccccctcagcatcccctgtgatgggcctgaggcaccgcaccaaacccctgctttttactggctatggatgaatgttactttcccaagatggagcacatgggccctgtgattggtacctgaggcccctggggtgtgataaaggattcatggccaggcgcagtggctcaagcctgtaacccaacactgtgtggcctggttttgttttgctttgttttgttttgtgtaatcccaactctttgggaggctgaggccagaggatggaggcaggagttggagaccagcctgggcaacagagggagacctcgtctgtattaaaaaaaaaaaaaaaaaaaaaaaaaaaatcctagtaattagcaagagttttccctattttgtggaagaccttggataaaacctacttcatgtgggtgagaaaaatctcacctttgtaagttatatctccattgttaaaaggacacacatttttgttttcttcttaagagaaggaacttccttaaatagcccccagctggccatccatgtcagaattcttccagttttgaggccttagagcacagctcaaagggaaggccaggcccatgttccgtgctgatttccctctgcacttgcctttggtgtgtctcttcactgacgtcttctgggcccagggaaaacaaagccttggtgtgcctgtgacctttgttcagtgccaggctgtcagggccttcactctgccaggtatcggggtggtcttcctgtgggcaaggcccagcctttccacccttcggcaccctctgctaagccgagccaagtggagcagttggcctgaagaaatgaaaggaacctttgtccttccttccggtgtctgtttcagatgagatgtacaaaatggaggtcaggattaaggtagcagcagatgaaatcaatctggatatttgtagaggggttttgtgtggtttttattattgtgtatatattgctttgttttaatatagacaaaaaaaactagaaagtcttttaatttggaaaagaggtgaaagagaagtggagcagctgctgcacagtggatacagttctgccctttctgtgagggagcagcgctttgggaaccgtgtgtcggtaaactcagccccccacaatttgggcatgatagggttttgaaaaagcaaagctggctatgcagacggctccctagcctgacaggagagtgaccccagtgtggtccccagggggcagggacgcacctcaggatgtggacgcagtcttctcttctgcccttggccctcccatgtgcccttcagcttgtctccactctgctaacacattagggcaactggtcctgctggcagggcagaggggagtccactgaccctgtgctgggcagaatgcagcacgtcagggcccagggttcaagaccctcagccccgagggcagcgctagagtggggaccagcctggaagtgccagaacccactgatcacacccactctgatgctgtcttcctgttttttccactgcaggaaaggggctcatgccaaccccagtgacgcggaggcccagcttcgaaggaaccggcgattcgtttgcgtcctaccaccagctgagcggtaccccctacgagggcccaagcttcggcgctgacggccccacggcgctggaggagatgccgcggccgtacgtggactaccttttccccggagtcggcccccacgggcccggccaccagcaccagcacccacccaagggctacggtgccagcgtagaggcagcaggggcacacttcccgctgcagggcgcgcactacgggcggccgcacctgctggtgcctggggaacccctgggctacggagtgcagcgcagcccctccttccagagcaagacgccgccggagaccgggggttacgccagcctgcccacgaagggccagggaggaccgccaggcgccggcctcgctttcccaccccctgccgccgggctctacgtgccgcacccacaccacaagcaggccggtcccgcggcccaccagctgcatgtgctgggctcccgcagccaggtgttcgccagcgacagccccccgcagagcctgctcactccctcgcggaacagcctcaacgtggacctgtatgaattgggcagcacctccgtccagcagtggccggctgccaccctggcccgccgggactccctgcagaagccgggcctggaggcgccgccgcgcgcgcacgtggccttccggcctgactgcccagtgcccagcaggaccaactccttcaacagccaccagccgcggcccggtccgcctggcaaggccgagccctccctgcccgcccccaacaccgtgacggctgtcacggccgcgcacatcttgcacccggtgaagagcgtgcgtgtgctgaggccggagccgcagacggctgtggggccctcgcaccccgcctgggtgcccgcgcctgccccggcccccgcccccgcccccgccccggctgcggagggcttggacgccaaggaggagcatgccctggcgctgggcggcgcaggcgccttcccgctggacgtggagtacggaggcccagaccggaggtgcccgcctccgccctacccgaagcacctgctgctgcgcagcaagtcggagcagtacgacctggacagcctgtgcgcaggcatggagcagagcctccgtgcgggccccaacgagcccgagggcggcgacaagagccgcaaaagcgccaagggggacaaaggcggaaaggataaaaagcagattcagacctctcccgttcccgtccgcaaaaacagcagagacgaagagaagagagagtcacgcatcaagagctactcgccatacgcctttaagttcttcatggagcagcacgtggagaatgtcatcaaaacctaccagcagaaggttaaccggaggctgcagctggagcaagaaatggccaaagtaatttcacacttcatttttactatttgttcccggctcatccctctactggcaataggaagcacgcacaatcccttttctgtttcgactgtataccccttatcatcaaaacggctaatgggcgacagtctggttctggggccaacaacttggagaagttgcaaatggtgtgacctccctttcgcctttccccttgactcttctgaagaatcagagatagctgtgcataatgtagccagcgtaatgtaggtaatctacaatttacattgtaggtaaattagcaaattaagttttagggtatgtcctcgcttaacaaaattcatcatggattaataatagaacatttgaatgagtagaaacaaagtttaaggttttgtaaattgagattgtgggattttggaagaaaaatgtatctagtagtgattccatttattcttttaagtgtttagttagtaactaatgatttaaatataccttagttgacactgaagtgctgaagaaggtaattattgatgaaactatttaaattaaaatgtaacagatttaaatcacacaaagccaataattccaaagcctgaaaaccagatttgtgttcttttcagtgtcccgtattcactgatttttttacagatatacttttcatttgtgttttttttatttttattttttattttttaatttatttttagacggagtcttgctctgtcacccaggctggagcgcaatggcgcgatcttggctcgctgcaacctctgcctcctgggttcaagcgattctcctgcctcagcttcccgagtagttggggttacaggtgcctaccaccacgcctggccatttttttgtgtttttagtagagacgggggtttcgccatgttggtcagactggtctcgaactcttgacctcaggtgatctgcccacctcggcctccccaagtgctggaattacacgtgtgagccaccacacccagccgtttattttttatttatacatagtatttgtagatttgtggggaacatgtgatattttgttacatgcataggatatgtaatgatcaagtcaaggtatttagagtatccattgcctggtgtatttatcatttctgtgttggaagcatttcaagacctctcttctagctattttgaaatattgaatacatttttactaaccatagtcatactagttagagtttgttccttctatccagctgtatgtttgcaccaattaacttctcatctcccctcaacacacacacaccctttcccacctctggtaactatcattctactctctacctctatgagatcaattattttagctcccacatatcagtaacagtgtgtggtgttctaaccgaacttctgttcctggcttatttcacttaacataatgacctccagttccattcatgttgctccaaatgacaggatttcattcttttttatggctgaatagtatcccatggtgtacacagaccacattttctttatctgttcatcagttgatggacacttcagttgattccatgtttttactgttgtgaatagtgctgcaataaacatggggtgcaggtatccctttgatatactgatttcctttcctttagataaatacccaataatgggtttggtagattgtatggtagttctatttttagtttcttttttttcctttttgataatagtcgttctaactggggagagattatatctcattgtggttttcatttgcatttccctgatggttaatgagcatctttccatgcacctcttagccatttgtgtatcttcttttgacaagtgtctattcaggtcattagctcacttttttttctttttgagacagagtttcgctcttgttgcccaggctggagtgcaatggcacgatctcagctcaccacaacctccgcctcccgggttcaagtgattctcctgcctcagcctaccgagcagctgggattacaggcatgcgccaccacgcccagctagttttatgtttttagtagagacagggtttcaccatgttgttcaggctggtctcaaacttccgacctcagatgatccacctgtctcagcctcccagggtgctgggattacaggtgtgagccaccgcgcctggccttattttatttattttttttttaattaagacggagtcttgctctgttgcccaggctggagtgcagtggtgaaatctcggctcactgcaacctctgccttctggattcaagctattctcctgcctcagcctcctgagagctgggactacaggtgtgcgacaccatgctcagctaatttttgtatgtttagtagagacggggtttcaccatgttagtcaggctggtctcaaactcctgacctcaagtaatccgcctgcctcagcctcccaaagtgctgggattacaggcgtgagccaccatatctggccttttggcttactttttaatgggattatttgatattttttttgctgttgagttgagttccttgtatattctgaataatagtcttttgtcagatgaatagtttgtgaatattttctcctgttcaacacaggtatcctctttactctgttgtttcctttgctctgcagaagctttttagcttaatatagtcccatttgtctactttggggtttttttgcctgtgcttttgagattttagccataaaaatctttgctcaaaccaatgtcctggagtatattttcatagcctctggtcttatttctaggtctttaatctgttttaagttgacattcctatatggtgagagattggggtctagtttcattcttctgcatatggatatctagttttcccagcatgtctctttttcagtgtacattcttggcaccgttgtcaaaaatcaggtggctgtaaatacgtggacttatttctgggttctctattctgttccattggtctatgtgtctgtttttataccaataccatgcagtttcagttactctaggcttgtaacatattttgaagtcaggtaacaattttgttctttttgcctaggattgctttgagtatttgggctccctgtgaattttagtattgttttttctagtaatgtgaaaaatatcattggtattttgatagggattgcatttaattggtagattgatttgggtagtatggtcattttaacaatattaaatctttctgtcggtgaacatgggatctcttttcatttgtttgtgtcctcttcagtttctttcttcagtgttttgtagttttctttgtagagctctttcactttttggttaaatttactcctagattttttttatagctgttgtaaatggcattcattattggtgtacagaaatccagatatccatatgcagaagaatgaaactagaccctatctctcaccatatacaagtctatctaatgtatgctactgatttttgtatgctgattgttgacttttcttcctgctttcccattttccctgagttactgaaagattagatggctcttggagttctaggaatgctgtggtccccttttccacagatttgtgttaatagaagtttcccttagtttttagagccaaaagtctcctagagaaagaactttcttttttatcttaacttttcattccatattcatgtctatatatggatataaaaaaacaaaactggccgggcacagtggctcaagcctgtaatccctgcactttgggaggccaaggtgggcagatcacctgaggtcaggagttcaagaccagcctggccaacatgatgaaacactgtttctactaaaaatacaaaaattagccaggtgtcatggtggcgggcacatgtagtcccagctactcgggaggctgagacagcagaatcgctggaacccaggaggcggaggctgcagtgagctgagattgtgccactgcactccagcctaggcgacagagcgagactctgtagtatatgagacccattcttctctgttctcctttctgtaaaatgagctaggttcctctcagttccagggcatccccatcccagtcatttgttatcatgggacttctctaatgtgattcttcctccttccttttccttctacacaggctggactctgtgaagctgagcaggagcagatgcggaagatcctctaccagaaagagtctaattacaacaggttaaagagggccaagatggacaagtctatgtttgtcaagatcaaaaccctggggatcggtgcctttggagaagtgtgccttgcttgtaaggtggacactcacgccctgtacgccatgaagaccctaaggaaaaaggatgtcctgaaccggaatcaggtggcccacgtcaaggccgagagggacatcctggccgaggcagacaatgagtgggtggtcaaactctactactccttccaagacaaagacagcctgtactttgtgatggactacatccctggtggggacatgatgagcctgctgatccggatggaggtcttccctgagcacctggcccggttctacatcgcagagctgactttggccattgagagtgtccacaagatgggcttcatccaccgagacatcaagcctgataacattttgatagatctggatggtcacattaaactcacagatttcggcctctgcactgggttcaggtggactcacaattccaaatattaccagaaaggtattgtctgaagtgtgccacatgcactttctatgtgtagatgtcactaaccccattgcaagcaactaaatttcccatcctagtggctcctaatcattttgaaatttttatctgtcactccattattttataaattggtgtgacatccttcccttccaaaaggaatagtgtgatatgcatttttttttaaggtagtggatttcaggtttactttttttttttttttttttttgagacagagtttcgctcttgttgcccaggctggagtgcaatggcatgatctcggctcactgcaacctctgcctcctgggttcaagtgattctcctgcctccagcctcccgagtagccgggattacagtcacgcaccaccacctctggctaattttgtatttttagtagagacggggtttctccgtgttggtcaggctggtctcaaactcccaacctcaggtgatccgcctgcctccgcctcccaaagtgctgggattacaggtgtgagccaccgtgcctggcctactatatttttaagacagtaggctacaaggtgtcacggggcctttgtggggaaccatcacctgcctcattaaagcaagccttaaaaaataaaagatttggctgggcatggtggctcacgcctgtaatcctagcactttgaaagcccaaggtgggcggatcacctggggtcaggagttcgagaccagcctgaccaacgtggagaaaccccgtctctactaaaaataacaaaattagccgggcgtggtgatgcatgccagtaatcccagctactgggaggctgaggcatgagaatcgcttgaacccgggaagcagaggttgcggtgagctgagatcgcgccattgcgccccagcctgggcaacaagagcgaaactctgtctcaaataaaataaaataaataaaagagtcacagcctcccaaggagccctctcttatagccaacctgcatctatgtagtgtatcattgaactccatttcctatagttctgccatttggaaaagccaaaaacagctgattattatcttctttatggctgagattcttgaagtagttattttaatatcatcacttagtcttttttctctaactcaaaactaactctaaatcatttaattcattctcattttctggcattgaagtaacctttgttcatgttgtttaaatcctcctaagttttccatgctcatcttaaaacatgtgtcaggcagttgttaccttttgattatggcctaagcgctaggagtgctgtccccgcagttcttccagcctctcctgcctgcagtgccttcctgccagctcagcacggtgcatggtgtcctgtgattcttcaccgtcatttctaccttggtgctagcgccaacctcaccacgtgtgtctccaaactaggaacagcaggctgcccctatggagcagctcagcggggattctctgtcctgatatgtcaggagctgattggaatgactttgctgttttaagctgtggatctgttgagttattgaagagtgaaaattcactttatattttgttcttttctttcactatccctgattcctgggtgaagggagccatgtcagacaggacagcatggagcccagcgacctctgggatgatgtgtctaactgtcggtgtggggacaggctgaagaccctagagcagagggcgcggaagcagcaccagaggtgcctggcacattcactggtggggactccaaactacatcgcacccgaggtgctcctccgcaaaggtacatgcgccatggccagccaccccgcaggaggtctccttcccttcagacgtgagctgtctctcgctggctctagctttccaaggacctaatgcttccagtcatatttttgtcctcatagaagcctgaaagctactaatttctgcaacatacaagcctccctcctgtcctggaagtgctcttgcttcagggggttggaagacatgcaccattagaccagtgtctgctggccctcgggctctacctagacccaagggaatgactccagccctgattttcacagtcagatgatggaaaccactctgagggccacaggacctctgctcagtctgcccagaccacacatttccgggctctagctttaacttctgtctcaggctcctggctgagttgtgccgtgtgcagctgggtgcttatgtgacagcgttggaagatcctttttctctcattctccctgctagaccataagcaaaagtggcaggtgccagttgtgtaaaatgactagtgctcataacatttgcctcctggatggatgcttcattctatcaaatgcaacatctggttcagtataggaggaatccttcagtgatcctgcatggtccacagtgacaatggggtgtaattaatccagagacaggcagcccctgccatcacatgttgtttaaagtcctttggagccagccagactcagttcaagtctgggttttctttgctagctgtggtaatccagcacaagttacttaactactcagaccacagacatagcaataacgaccttgagaggttgtgaataaccttggtgcccagtgaaggtctacttccctctaccacgtgcagcattctcaagaaaccattgcttggggtttttctgcagcctctgttgccaaacttggacaggaagaggtgggacggagagatagcagaggggcctgagggggctaccctggcatatgcagctgcaggcacccgcagactgacctcttaacatcccagtttatacttagcaaggattaggtgacatgaagacgatcctggcttgatgggtcatgaggctctgaaggaaaagtgggagaaaataagaggtaaacgagcctagcctacagcctcccagaggccagccctgacccagcacagctgggagccccgtgaggaaggcccggctccgtaggggcctcacacaaggagtgtttggcttacagtgaattgtccggggggttttgcccacctcctcctcatctccgtattcttcagcttcatccaaaactgacttagaagcctcccttgaccctcacctgactattcacaggttatagcactttatgtttttcagttctgttattttaattggtgcctctgtttgtgatctttaagaacataaaattctggctagtaactatttgctaacaataaaaataatctttttaaattaaaaagtattttcttattacaatgattaaaaatacaaaaacctaagcggccatggccaccgccccccaccaccccacccagtagtatccaggtacttacataggtccatcttgcgcacagtgcgatgcttcaacgcgctttcccacttaacaggaaatctgtatgttcagcatcttaatgaaattcacctcggaggagaattcatgcctgtgtagggattgagtgaactttgtcttgcagggtacactcaactctgtgactggtggagtgttggagtgattctcttcgagatgctggtggggcagccgccctttttggcacctactcccacagaaacccagctgaaggtaatgtgagaggaaccacgcatctgcttgctgtagacatctgatttgctcatgtacccatgaatctttggtcagcatttgccctcttattctgagtagggtaggaatggcagttgtataggatgggatttttaaaaataatctcattattttttaaattatctatttttaaattttctattttgataagcaaagccatggaattggacccattttaatatctgaaattctattaaacccttggccatctgccaccttgctatttccaggcaagaacagtgaggatcagcaaaggtgtgctgctgatccactgtctcccccacccacacctgccctgcagagaacacacggaactccaggaactatagttcacccctcagcaatgaggggtttggggtgccaaaccccctgcacagtcaaaaatctgcataactttcaactccccaaaaactttactaatagcctgttgactggaagccttaccagtaacatagcgtcaatgaacacatattttgtattttatatgtattagatcctgtattcttacaataaagcaagctagagaacagaaaatgctggccaggcgcagtggctcatgcctgtaatcccactactttgggaggatcataggctgggcgcagtggctcatgcctataatcccaccactttggaaggccaaggtgggcagattacctgaggtcaggagttcaagaccagcctgggcaacatggcgaaacccgtctctactgaaaatacaaaatattagtccatcatggtggtgtgcacctgtaatcccagctactcaggaggctgaggcaggagaaccacttgaacccaggaagcagaggatgcagtgagccgagatcacaccactgcagtccagcctgggtgacagagtgagactctgtctaaagaaaaaaaatcataaagaagagaaaataggtttactattttaataattgaaagtggatcatcataaaggtctccatctttgtcatcttcatgtggagtgggctgaggaaggggaggcattggccttgctgtctcagggatggcaaaggtggaagaaaatgctagtgtaagtgaccctcaaactgtgttgttcaagggtcaactgtatctaaagaaagcagtttctttatttggatattatatcattgttcgcaaactgtcagctatgtggtcaggctagttgtgcatattcctaatattcattcaaagtagttaaataattgtcagtcatttaatactaaattattagttttaaaatgacagccatttgctttctgaaatgagttactaagggttgaactgagaattgaaattaagaatctgcagtcttctgtggacataccaactgacacacagtccttggaattttcacatgccctggtggtcatgtgagccaccagggcatgtggttattaggccagggagcctaaattaataactttaattagaaaatctgtctagtaaggttgggcgtggtggatcatgcctgtcatcccagcactttgggaggcggaggcgggcagattacgaggtcaggagatcgagactagcctggccaacgtagtgaaaccccgtctctactgaaaatacaaaaaattagcctggcatgggggcgggcgcctgtagtctcagctacttgggaggctgaggcaggagaatcgcttgaacccaggaggcagaggttgcagtgagccgagatcacgccactgcactccaacctggatgacagagcgagactctgtttcaaaaaaagaaaaaagagaaatcgaaaaaccctaaagtaaggcttagtttcactctaggaacagtaaaattggaatctggcattatctgcgccctaattgaatggctgagctactcactaaattgcccacatgataattcagatttttttattctggtaaaatatacataacataaaatttaccatctaattattttaatggtaaattaaaatttaccatctaattattttaatggtaaattaaaatttaccatctaattattttaatggtaaattaaaatttaccatcttaattattttaattaccatttatttaataattattttaattatttaccatttttaattattttagtgtataattcagtgacattaagtacattcacaatattgtgcaaccatcaccaccctctattttcaaatgtgttaatcgtcccaaacccattaaacagaaactccccactctccttttcagcacctgctcgcctctcttctgcttcctgtctctgtgagtttggttatgcttaggacttttttttttttttttttgagacagggttttgctctgtatcccaggctgcagtgcagtggcacaatcttggctcattgcaacctctgccttccgggttctcatgcctcagcctcccaagcagctgggattacaggtgcctgccacaacaccagctaatttttgtatttttagtagagatgtggcttcatcatgttggtcaggctggtttcaaactcctgacctcaagttatccacccacctcagcctcccaaaatgttgggattataggtgtgagccactgtgcctggcctcgggacttcttgtaagtggagtcatgcagtatctgtctttttgtgtctagtttatttcacttagcgtaatgtcctcagggttcatccattgttgtagcttcctttttaaggtggaataataattccactgtatgagtccctgcttccggttcttttggatataaaccagaaagtgggtttatatcccactggattatatggtcgttctgtgtttaactttttgaggaactcccaaactgtttgccatagtggctgcaccattttacattcccaccaacagtggctgagtgttcagtttccctacatcctcaataagtattttcctgtttttgttttttttaagtagtagccaccctaggggatgtaaggtggtatctcattgtggttttgagttgtatttccctagtgtttaattatattgagcttattttcatgtccttattggtcatttgtatatctttggaaatatctcctcaagtccattaccctttttaaatcaacttatttggttttgttattgttgttgagttgtaggagttctgtattttctctgggtactaaccccttttcaaatacatgttttgaaatctgttctcccattttgttgcctttttgctatcagtaatgtccttcgatgcacaaaagttttaaatttttatgcagtccaatttattttttcttttattccctgtgcttttggtggcatgtctaagaaatcattgccaaactcaggttcatgaagatttcaccctatgttttcttctaggagctctacagttttagctctatgaaaacaactacttaggttcaaaccaagcctaccacccacacacccactaacttccatgccttatccgctgtcccatcaccccagctggtagccagtcatgttggccttgtttcctcctgattctaagtgtaaacaataaagaagtcccctaggttttgtcttcacagtagacacatctctacaacaagtgcatttactgaacgtccagatggctggtttgtgcagttgagcatgtaaggtcacatggggtcagtcagctttattcttccctatgaagtttttcctgtttgtttttcaaaaccccagttggccgttttttgaccacaataagtatttgaatgagcgtcatgatggtttgcagaaagccattgccatagctaaagaaataactttagcggatcacctgaggtcaggagttcaggactagcctggccaacgtggtgaaaccctgtctctactaaaaatacaaaaatcagccgggtgtggtggcaggcgcctgtaatcccagctactcgggaggctgaggcaggagaatcgcttgaacccaggaggcggaggttgcagtgagccaagatcgcaccactgcactccaacctgggcaacacagcgagactccatctcaaaaaaataaaaagaaagaaagaacttgtagaccatcattctcttcatttttgtggaaagcacaaaattctttggctaaacagtatttctgatagaagaaaatcagtatctttttgtctgtatttgactggtcatcctggcctcaggctgtgagccatcgactgaaatgacactgactttttgtggctgctgagatcaacaactgctgcttgtgtctattctaactcctctcctattgtgaaactaaacatatttgaaagtcacgtcatcacacgctgtcccagaactgcccaagatgtgaggagaaactaacctgttggctctgttgtttcctcaggtgatcaactgggagaacacgctccacattccagcccaggtgaagctgagccctgaggccagggacctcatcaccaagctgtgctgctccgcagaccaccgcctggggcggaatggggccgatgacctgaaggcccaccccttcttcagcgccattgacttctccagtgacatccggaagcagccagccccctacgttcccaccatcagccaccccatggacacctcgaatttcgaccccgtagatgaagaaagcccttggaacgatgccagcgaaggtagcaccaaggcctgggacacactcacctcgcccaataacaagcatcctgagcacgcattttacgaattcaccttccgaaggttctttgatgacaatggctacccctttcgatgcccaaagccttcaggagcagaagcttcacaggctgagagctcagatttagaaagctctgatctggtggatcagactgaaggctgccagcctgtgtacgtgtagatgggggccaggcacccccaccactcgctgcctcccaggtcagggtcccggagccggtgccctcacaggccaatagggaagccgagggctgttttgttttaaattagtccgtcgattacttcacttgaaattctgctcttcaccaagaaaacccaaacaggacacttttgaaaacaggactcagcatcgctttcaataggcttttcaggaccttcactgcattaaaacaatatttttgaaaatttagtacagtttagaaagagcacttattttgtttatatccattttttcttactaaattatagggattaactttgacaaatcatgctgctgttattttctacatttgtattttatccatagcacttattcacatttaggaaaagacataaaaactgaagaacattgatgagaaatctctgtgcaataatgtaaaaaaaaaaaaagataacactctgctcaatgtcacggagaccattttatccacacaatggtttttgttttttattttttcccatgtttcaaaattgtgatataatgatataatgttaaaagctgctttttttggctttttgcatatctagtataataggaagtgtgagcaaggtgatgatgtggctgtgatttccgacgtctggtgtgtggagagtactgcatgagcagagttcttctattataaaattaccatatcttgccattcacagcaggtcctgtgaatacgtttttactgagtgtctttaaatgaggtgttctagacagtgtgctgataatgtattgtgcgggtgacctcttcgctatgattgtatctcttactgttttgttaaagaaatgcagatgtgtaactgagaagtgatttgtgtgtgtgtcttggttgtgattggattctttggggggggggaactgaaacatttgtcatatactgaacttatatacatcaaaagggattaatacagcgatgccaaaaagtttaatcacggacacacgtccgtttctgtagtccgtatgctctttcattcttggtagagctggtatgtggaatgccatacctctgaccctactacttacctttttactgacagactgcccacactgaaagcttcagtgaatgttcttagtcctgttttcttctgttactgtcaggaaactgagtgatctaatggttctctcactttttttttgttcttttagtgtactttgaagtatcaaatcttaacttggtttaaacaatacatattcctaacctttgtaaaaaagcaaagattcttcaaaatgacattgaaataaaaagtaagccatacgtattttcttagaagtatagatgtatgtgcgtgtatacacacacacacacacacacagagataaacacaatattccttatttcaaattagtatgattcctatttaaagtgatttatatttgagtaaaaagttcaattcttttttgctttttaaaaaatctgatgcttcataattttcattatattattccacatatttttccttgaagttcttagcataatgtatccattacttagtatatatctaggcaacaacacttagaagtttatcagtgtttaaactaaaaaaataaagattcctgtgtactggtttacatttgtgtgagtggcatactcaagtctgctgtgcctgtcgtcgtgactgtcagtattctcgctattttatagtcgtgccatgttgttactcacagcgctctgacatactttcatgtggtaggttctttctcaggaactcagtttaactattatttattgatatatcattacctttgaaaagcttctactggcacaatttattattaaaattttgaatccaaat

SEQ ID NO: 178 - DNA, 5335 bp, Homo sapiens
cttgggtctgcgctttggaaccgcggcgtgagcgccccgggaagatggagcagtcgccgtccacgccaccgccgccgcccggggctcccccgtccctgcggggccagcagcagctccagccaccagtgcccggtctcccggcgcgagaggcccgggagccgccggccaggacgcccccgagggtgtagaccgcgcccctggagagagtgataatcttcaaaatgaagactttggaaaattttaggttctctataggaactacaaaaatggaaggaaagaacattttcaaaaggaaattattttgaaagtatgtttacaacaaactgatactattgacagtttttttttttaaataataaaacactttaagaagattgtatttatggtaaaaggaaactggactaacaatgaggccaaagacttttcctgccacgacttattctggaaatagccggcagcgactgcaagagattcgtgaggggttaaagcagccatccaagtcttcggttcaggggctacccgcaggaccaaacagtgacacttccctggatgccaaagtcctggggagcaaagatgccaccaggcagcagcagcagatgagagccaccccaaagttcggaccttatcagaaagccttgagggaaatcagatattccttgttgccttttgctaatgaatcgggcacctctgcagctgcagaagtgaaccggcaaatgctgcaggaactggtgaacgcaggatgcgaccaggagatggctggccgagctctcaagcagactggcagcaggagcatcgaggccgccctggagtacatcagcaagatgggctacctggacccgaggaatgagcagattgtgcgggtcattaagcagacctccccaggaaaggggctcatgccaaccccagtgacgcggaggcccagcttcgaaggaaccggcgattcgtttgcgtcctaccaccagctgagcggtaccccctacgagggcccaagcttcggcgctgacggccccacggcgctggaggagatgccgcggccgtacgtggactaccttttccccggagtcggcccccacgggcccggccaccagcaccagcacccacccaagggctacggtgccagcgtagaggcagcaggggcacacttcccgctgcagggcgcgcactacgggcggccgcacctgctggtgcctggggaacccctgggctacggagtgcagcgcagcccctccttccagagcaagacgccgccggagaccgggggttacgccagcctgcccacgaagggccagggaggaccgccaggcgccggcctcgctttcccaccccctgccgccgggctctacgtgccgcacccacaccacaagcaggccggtcccgcggcccaccagctgcatgtgctgggctcccgcagccaggtgttcgccagcgacagccccccgcagagcctgctcactccctcgcggaacagcctcaacgtggacctgtatgaattgggcagcacctccgtccagcagtggccggctgccaccctggcccgccgggactccctgcagaagccgggcctggaggcgccgccgcgcgcgcacgtggccttccggcctgactgcccagtgcccagcaggaccaactccttcaacagccaccagccgcggcccggtccgcctggcaaggccgagccctccctgcccgcccccaacaccgtgacggctgtcacggccgcgcacatcttgcacccggtgaagagcgtgcgtgtgctgaggccggagccgcagacggctgtggggccctcgcaccccgcctgggtgcccgcgcctgccccggcccccgcccccgcccccgccccggctgcggagggcttggacgccaaggaggagcatgccctggcgctgggcggcgcaggcgccttcccgctggacgtggagtacggaggcccagaccggaggtgcccgcctccgccctacccgaagcacctgctgctgcgcagcaagtcggagcagtacgacctggacagcctgtgcgcaggcatggagcagagcctccgtgcgggccccaacgagcccgagggcggcgacaagagccgcaaaagcgccaagggggacaaaggcggaaaggataaaaagcagattcagacctctcccgttcccgtccgcaaaaacagcagagacgaagagaagagagagtcacgcatcaagagctactcgccatacgcctttaagttcttcatggagcagcacgtggagaatgtcatcaaaacctaccagcagaaggttaaccggaggctgcagctggagcaagaaatggccaaagctggactctgtgaagctgagcaggagcagatgcggaagatcctctaccagaaagagtctaattacaacaggttaaagagggccaagatggacaagtctatgtttgtcaagatcaaaaccctggggatcggtgcctttggagaagtgtgccttgcttgtaaggtggacactcacgccctgtacgccatgaagaccctaaggaaaaaggatgtcctgaaccggaatcaggtggcccacgtcaaggccgagagggacatcctggccgaggcagacaatgagtgggtggtcaaactctactactccttccaagacaaagacagcctgtactttgtgatggactacatccctggtggggacatgatgagcctgctgatccggatggaggtcttccctgagcacctggcccggttctacatcgcagagctgactttggccattgagagtgtccacaagatgggcttcatccaccgagacatcaagcctgataacattttgatagatctggatggtcacattaaactcacagatttcggcctctgcactgggttcaggtggactcacaattccaaatattaccagaaagggagccatgtcagacaggacagcatggagcccagcgacctctgggatgatgtgtctaactgtcggtgtggggacaggctgaagaccctagagcagagggcgcggaagcagcaccagaggtgcctggcacattcactggtggggactccaaactacatcgcacccgaggtgctcctccgcaaagggtacactcaactctgtgactggtggagtgttggagtgattctcttcgagatgctggtggggcagccgccctttttggcacctactcccacagaaacccagctgaaggtgatcaactgggagaacacgctccacattccagcccaggtgaagctgagccctgaggccagggacctcatcaccaagctgtgctgctccgcagaccaccgcctggggcggaatggggccgatgacctgaaggcccaccccttcttcagcgccattgacttctccagtgacatccggaagcagccagccccctacgttcccaccatcagccaccccatggacacctcgaatttcgaccccgtagatgaagaaagcccttggaacgatgccagcgaaggtagcaccaaggcctgggacacactcacctcgcccaataacaagcatcctgagcacgcattttacgaattcaccttccgaaggttctttgatgacaatggctacccctttcgatgcccaaagccttcaggagcagaagcttcacaggctgagagctcagatttagaaagctctgatctggtggatcagactgaaggctgccagcctgtgtacgtgtagatgggggccaggcacccccaccactcgctgcctcccaggtcagggtcccggagccggtgccctcacaggccaatagggaagccgagggctgttttgttttaaattagtccgtcgattacttcacttgaaattctgctcttcaccaagaaaacccaaacaggacacttttgaaaacaggactcagcatcgctttcaataggcttttcaggaccttcactgcattaaaacaatatttttgaaaatttagtacagtttagaaagagcacttattttgtttatatccattttttcttactaaattatagggattaactttgacaaatcatgctgctgttattttctacatttgtattttatccatagcacttattcacatttaggaaaagacataaaaactgaagaacattgatgagaaatctctgtgcaataatgtaaaatgatgatgtggctgtgatttccgacgtctggtgtgtggagagtactgcatgagcagagttcttctattataaaattaccatatcttgccattcacagcaggtcctgtgaatacgtttttactgagtgtctttaaatgaggtgttctagacagtgtgctgataatgtattgtgcgggtgacctcttcgctatgattgtatctcttactgttttgttaaagaaatgcagatgtgtaactgagaagtgatttgtgtgtgtgtcttggttgtgattggattctttggggggggggaactgaaacatttgtcatatactgaacttatatacatcaaaagggattaatacagcgatgccaaaaagtttaatcacggacacacgtccgtttctgtagtccgtatgctctttcattcttggtagagctggtatgtggaatgccatacctctgaccctactacttacctttttactgacagactgcccacactgaaagcttcagtgaatgttcttagtcctgttttcttctgttactgtcaggaaactgagtgatctaatggttctctcactttttttttgttcttttagtgtactttgaagtatcaaatcttaacttggtttaaacaatacatattcctaacctttgtaaaaaagcaaagattcttcaaaatgacattgaaataaaaagtaagccatacgtattttcttagaagtatagatgtatgtgcgtgtatacacacacacacacacacacagagataaacacaatattccttatttcaaattagtatgattcctatttaaagtgatttatatttgagtaaaaagttcaattcttttttgctttttaaaaaatctgatgcttcataattttcattatattattccacatatttttccttgaagttcttagcataatgtatccattacttagtatatatctaggcaacaacacttagaagtttatcagtgtttaaactaaaaaaataaagattcctgtgtactggtttacatttgtgtgagtggcatactcaagtctgctgtgcctgtcgtcgtgactgtcagtattctcgctattttatagtcgtgccatgttgttactcacagcgctctgacatactttcatgtggtaggttctttctcaggaactcagtttaactattatttattgatatatcattacctttgaaaagcttctactggcacaatttattattaaaattttgaatcc

SEQ ID NO: 179 - protein, 1084 aa, Homo sapiens
MRPKTFPATTYSGNSRQRLQEIREGLKQPSKSSVQGLPAGPNSDTSLDAKVLGSKDATRQQQQMRATPKFGPYQKALREIRYSLLPFANESGTSAAAEVNRQMLQELVNAGCDQEMAGRALKQTGSRSIEAALEYISKMGYLDPRNEQIVRVIKQTSPGKGLMPTPVTRRPSFEGTGDSFASYHQLSGTPYEGPSFGADGPTALEEMPRPYVDYLFPGVGPHGPGHQHQHPPKGYGASVEAAGAHFPLQGAHYGRPHLLVPGEPLGYGVQRSPSFQSKTPPETGGYASLPTKGQGGPPGAGLAFPPPAAGVPHPHHKQAGPAAHQLHVLGSRSQVFASDSPPQSLLTPSRNSLNVDLYELGSTSVQQWPAATLARRDSLQKPGLEAPPRAHVAFRPDCPVPSRTNSFNSHQPRPGPPGKAEPSLPAPNTVTAVTAAHILHPVKSVRVLRPEPQTAVGPSHPAWVPAPAPAPAPAPAPAAEGLDAKEEHALGGAGAFPLDVEYGGPDRRCPPPPYPKHLLLRSKSEQYDLDSLCAGMEQSLRAGPNEPEGGDKSRKSAKGDKGGKDKKQIQTSPVPVRKNSRDEEKRESRIKSYSPYAFKFFMEQHVENVIKTYQQKVNRRLQLEQEMAKAGLCEAEQEQMRKILYQKESNYNRLKRAKMDKSMFVKIKTLGIGAFGEVCLACKVDTHALYAMKTLRKKDVLNRNQVAHVKAERDILAEADNEWVVKLYYSFQDKDSLYFVMDYIPGGDMMSLLIRMEVFPEHLARFYIAELTLAIESVHKMGFIHRDIKPDNILIDLDGHIKLTDFGLCTGFRWTHNSKYYQKGSHVRQDSMEPSDLWDDVSNCRCGDRLKTLEQRARKQHQRCLAHSLVGTPNYIAPEVLLRKGYTQLCDWWSVGVILFEMLVGQPPFLAPTPTETQLKVINWENTLHIPAQVKLSPEARDLITKLCCSADHRLGRNGADDLKAHPFFSAIDFSSDIRKQPAPYVPTISHPMDTSNFDPVDEESPWNDASEGSTKAWDTLTSPNNKHPEHAFYEFTFRRFFDDNGYPFRCPKPSGAEASQAESSDLESSDLVDQTEGCQPVYV

SEQ ID NO: 180 - DNA, 5509 bp, Homo sapiens
cttgggtctgcgctttggaaccgcggcgtgagcgccccgggaagatggagcagtcgccgtccacgccaccgccgccgcccggggctcccccgtccctgcggggccagcagcagctccagccaccagtgcccggtctcccggcgcgagaggcccgggagccgccggccaggacgcccccgagggtgtagaccgcgcccctggagagagtgataatcttcaaaatgaagactttggaaaattttaggttctctataggaactacaaaaatggaaggaaagaacattttcaaaaggaaattattttgaaagtatgtttacaacaaactgatactattgacagtttttttttttaaataataaaacactttaagaagattgtatttatggtaaaaggaaactggactaacaatgaggccaaagacttttcctgccacgacttattctggaaatagccggcagcgactgcaagagattcgtgaggggttaaagcagccatccaagtcttcggttcaggggctacccgcaggaccaaacagtgacacttccctggatgccaaagtcctggggagcaaagatgccaccaggcagcagcagcagatgagagccaccccaaagttcggaccttatcagaaagccttgagggaaatcagatattccttgttgccttttgctaatgaatcgggcacctctgcagctgcagaagtgaaccggcaaatgctgcaggaactggtgaacgcaggatgcgaccaggagatggctggccgagctctcaagcagactggcagcaggagcatcgaggccgccctggagtacatcagcaagatgggctacctggacccgaggaatgagcagattgtgcgggtcattaagcagacctccccaggaaaggggctcatgccaaccccagtgacgcggaggcccagcttcgaaggaaccggcgattcgtttgcgtcctaccaccagctgagcggtaccccctacgagggcccaagcttcggcgctgacggccccacggcgctggaggagatgccgcggccgtacgtggactaccttttccccggagtcggcccccacgggcccggccaccagcaccagcacccacccaagggctacggtgccagcgtagaggcagcaggggcacacttcccgctgcagggcgcgcactacgggcggccgcacctgctggtgcctggggaacccctgggctacggagtgcagcgcagcccctccttccagagcaagacgccgccggagaccgggggttacgccagcctgcccacgaagggccagggaggaccgccaggcgccggcctcgctttcccaccccctgccgccgggctctacgtgccgcacccacaccacaagcaggccggtcccgcggcccaccagctgcatgtgctgggctcccgcagccaggtgttcgccagcgacagccccccgcagagcctgctcactccctcgcggaacagcctcaacgtggacctgtatgaattgggcagcacctccgtccagcagtggccggctgccaccctggcccgccgggactccctgcagaagccgggcctggaggcgccgccgcgcgcgcacgtggccttccggcctgactgcccagtgcccagcaggaccaactccttcaacagccaccagccgcggcccggtccgcctggcaaggccgagccctccctgcccgcccccaacaccgtgacggctgtcacggccgcgcacatcttgcacccggtgaagagcgtgcgtgtgctgaggccggagccgcagacggctgtggggccctcgcaccccgcctgggtgcccgcgcctgccccggcccccgcccccgcccccgccccggctgcggagggcttggacgccaaggaggagcatgccctggcgctgggcggcgcaggcgccttcccgctggacgtggagtacggaggcccagaccggaggtgcccgcctccgccctacccgaagcacctgctgctgcgcagcaagtcggagcagtacgacctggacagcctgtgcgcaggcatggagcagagcctccgtgcgggccccaacgagcccgagggcggcgacaagagccgcaaaagcgccaagggggacaaaggcggaaaggataaaaagcagattcagacctctcccgttcccgtccgcaaaaacagcagagacgaagagaagagagagtcacgcatcaagagctactcgccatacgcctttaagttcttcatggagcagcacgtggagaatgtcatcaaaacctaccagcagaaggttaaccggaggctgcagctggagcaagaaatggccaaagctggactctgtgaagctgagcaggagcagatgcggaagatcctctaccagaaagagtctaattacaacaggttaaagagggccaagatggacaagtctatgtttgtcaagatcaaaaccctggggatcggtgcctttggagaagtgtgccttgcttgtaaggtggacactcacgccctgtacgccatgaagaccctaaggaaaaaggatgtcctgaaccggaatcaggtggcccacgtcaaggccgagagggacatcctggccgaggcagacaatgagtgggtggtcaaactctactactccttccaagacaaagacagcctgtactttgtgatggactacatccctggtggggacatgatgagcctgctgatccggatggaggtcttccctgagcacctggcccggttctacatcgcagagctgactttggccattgagagtgtccacaagatgggcttcatccaccgagacatcaagcctgataacattttgatagatctggatggtcacattaaactcacagatttcggcctctgcactgggttcaggtggactcacaattccaaatattaccagaaagggagccatgtcagacaggacagcatggagcccagcgacctctgggatgatgtgtctaactgtcggtgtggggacaggctgaagaccctagagcagagggcgcggaagcagcaccagaggtgcctggcacattcactggtggggactccaaactacatcgcacccgaggtgctcctccgcaaagggtacactcaactctgtgactggtggagtgttggagtgattctcttcgagatgctggtggggcagccgccctttttggcacctactcccacagaaacccagctgaaggtgatcaactgggagaacacgctccacattccagcccaggtgaagctgagccctgaggccagggacctcatcaccaagctgtgctgctccgcagaccaccgcctggggcggaatggggccgatgacctgaaggcccaccccttcttcagcgccattgacttctccagtgacatccggaagcagccagccccctacgttcccaccatcagccaccccatggacacctcgaatttcgaccccgtagatgaagaaagcccttggaacgatgccagcgaaggtagcaccaaggcctgggacacactcacctcgcccaataacaagcatcctgagcacgcattttacgaattcaccttccgaaggttctttgatgacaatggctacccctttcgatgcccaaagccttcaggagcagaagcttcacaggctgagagctcagatttagaaagctctgatctggtggatcagactgaaggctgccagcctgtgtacgtgtagatgggggccaggcacccccaccactcgctgcctcccaggtcagggtcccggagccggtgccctcacaggccaatagggaagccgagggctgttttgttttaaattagtccgtcgattacttcacttgaaattctgctcttcaccaagaaaacccaaacaggacacttttgaaaacaggactcagcatcgctttcaataggcttttcaggaccttcactgcattaaaacaatatttttgaaaatttagtacagtttagaaagagcacttattttgtttatatccattttttcttactaaattatagggattaactttgacaaatcatgctgctgttattttctacatttgtattttatccatagcacttattcacatttaggaaaagacataaaaactgaagaacattgatgagaaatctctgtgcaataatgtaaaaaaaaaaaaagataacactctgctcaatgtcacggagaccattttatccacacaatggtttttgttttttattttttcccatgtttcaaaattgtgatataatgatataatgttaaaagctgctttttttggctttttgcatatctagtataataggaagtgtgagcaaggtgatgatgtggctgtgatttccgacgtctggtgtgtggagagtactgcatgagcagagttcttctattataaaattaccatatcttgccattcacagcaggtcctgtgaatacgtttttactgagtgtctttaaatgaggtgttctagacagtgtgctgataatgtattgtgcgggtgacctcttcgctatgattgtatctcttactgttttgttaaagaaatgcagatgtgtaactgagaagtgatttgtgtgtgtgtcttggttgtgattggattctttggggggggggaactgaaacatttgtcatatactgaacttatatacatcaaaagggattaatacagcgatgccaaaaagtttaatcacggacacacgtccgtttctgtagtccgtatgctctttcattcttggtagagctggtatgtggaatgccatacctctgaccctactacttacctttttactgacagactgcccacactgaaagcttcagtgaatgttcttagtcctgttttcttctgttactgtcaggaaactgagtgatctaatggttctctcactttttttttgttcttttagtgtactttgaagtatcaaatcttaacttggtttaaacaatacatattcctaacctttgtaaaaaagcaaagattcttcaaaatgacattgaaataaaaagtaagccatacgtattttcttagaagtatagatgtatgtgcgtgtatacacacacacacacacacacagagataaacacaatattccttatttcaaattagtatgattcctatttaaagtgatttatatttgagtaaaaagttcaattcttttttgctttttaaaaaatctgatgcttcataattttcattatattattccacatatttttccttgaagttcttagcataatgtatccattacttagtatatatctaggcaacaacacttagaagtttatcagtgtttaaactaaaaaaataaagattcctgtgtactggtttacatttgtgtgagtggcatactcaagtctgctgtgcctgtcgtcgtgactgtcagtattctcgctattttatagtcgtgccatgttgttactcacagcgctctgacatactttcatgtggtaggttctttctcaggaactcagtttaactattatttattgatatatcattacctttgaaaagcttctactggcacaatttattattaaaattttgaatccaaat

SEQ ID NO: 181 - protein, 1084 aa, Homo sapiens; identical to SEQ ID NO: 179

SEQ ID NO: 182 - DNA, 70519 bp, Mus musculus
  misc_feature (1)...(70519): n = A,T,C or G
gggagtttcctctcaactatcgggggagaaactccccatagctggtgttttcctcccgggggccgcgttccccgccccgcgtatcggcggttgccgccgccgccgccggtgcttccacctctgccatctcttcaccacctcgggccccggtgtccccggccagcactatgcccatcttactgttcctgatagacacgtctgcctctatgaaccagcgcagccatctgggcaccacctacctggacacggccaaaggcgcggtagagaccttcatgaaggtaccgactaacccagccccggtggtgacccggacccggtggcccgcggggggcagggcggggggcagcgggtttactgcgggctccgcgggcgcggggacccctcccccaccgcgcgggcgggcgggcgggcgctgggagcgggctctgctgggcctggcccatgtggggctgctgtgggtgcggggggcggcggagggacggccctgcgtgtgcggtactgtgggggcggccagcgacccttctgcgactggtaacctcgcctctgtgtttccctctctcccgcccgtccccaccctggcccgcagctccgtgcccgggaccctgccagcagaggagacaggtatatgctggtcactttcgaagagccgccctatgctatcaaggtaacagccctcgccctccccctccnnnnnnnnnnnnnnnnnnnncccctcccttccctgatcctgcctagctcgccctccccgccccctcttcattatgctcccctcccccacggccgctcccgcctccaggtcccttccccgcggcctcccacccctccccagcccgggagcgtcagcgaggtggcagtttctggcccaccgccgtcccctccgggtcctgctcggcctggcggcggaggcgctacgatcaacatggccgacatttcccctccgcggcgtgagcggcagcaatgaactgtgggggatatttattcaagttagcccgagtgacagcggggcccagccttgcctagcccgggtttgcattaaaagggaatcagccaaagctggcagggaagcctggaggggggcttcgagacttggtcatcacagagtggaactaggaaggccaccgatcggtgggacagctgtggtcaacttaagaagtcctgctgccatctgcctcccactagcaccgtcgcaacacccgtcccttgcacacaatttggaggatgttatgttagcaaatttcccagtgaagttattaaagtattaagacggttgttaacttaacaaaaggtgtagggcaagcaggttcattcttggccacctttggaagagtttcctcaccagagacaacagttataacacattccccaagccatatcaagcaaaagtgaagttaaatatgcaaacctgaaatggaatacctacttggtggacatcacattgtaatcggtgtccatgtgtgtacatgacttcaaatgataaaaaaaaaaatcttacatctttcttttcaggctggatggaaagaaaaccatgcaacgtttatgaatgaactgaaaaaccttcaggcagaaggacttacgactcttggccaatccctaaggacagcttttgatttgttaaatttaaatagattagtaactggcatagacaactatgggcaggtaggttgaatactaaggtagaaaagagttgtttttatttttgtgtacaaaaccacaatccagtccaaaagtatgtaacatggaatgcaagtataaaacattggaggttgaacaacagtgcacaccgttcaaaacatctaaggtattatggccgcatatcccccacgcccctttaaatgtatttgcattcagaattcaaatctgaattcttggctagaaagttgacacacatttggtttcagtccctcagagttcataaaaaagacataaaagggaaggtgtcctgcctcaatgtatcagtctgagtttcctgtaggcacatatgcaaccattgaatgggccacagccattagctgacttcgtagttgcttctatattataaagatattggaagaaatgatttttagacaagggtttagcttaacctcgattgtaaactcaggcaagagttttcagtggtgtgcagtaactggttgactgcattcagtacgaagcttgaaatcaatgacagattcagaagttctaaagtttaaaaattctaaacccttgggaagatgttttctgcaaaacatgaaaatttgcctgtcttcctgaagctccctaaggttgcttttttcatctgtgaggatgggacaagagctttaagtcacaacagtcattgaccaatgttactaacttaggacattgctctcctagaaatgcaagatgccaaaggatatgcagtggtgtacacaaggaataatattacacccaaggacttcagtacgcaaagcactattaccataatgctatatttaggaatatatgttatatacttttcccaagttccataatgcacagttctcgtgaattttgaacattttaaagaatttttttctgtgacttcaagctatatgcctcacttggggataattcttaaacatctttagaaatgattgattttggtcttacagcatttaaagtatgcattacaaatcagatttctctggaaatcatttccatcatttaaataggtaatcattttaacgtacatttttgttgttgttactttataactctttgccacttgttggtcagtttttgtaaaagcagtttttttcctttgttggctataatgctactgtctttatcatttaaaattttaatccaaggttactgagttcaaagacacctttgaaacttgctatttagttcctttatttcgtttgtcaggtcgtgtgttatagaactatcaatttcctgtttttctgtgtcacatttcataagagagaaggacatttggatatgtccacctctcatatttttaaaacgtggcataaagtcctttaggaggattgtttgccacggagagatttgagggcatttgtatacttttgtaggaagtttaaggctgcagggagacctgtgctgtatcactttgaccagaaggaagaaagccctggagattgtgatgctctcactgccaggcagcaaggatgctgcctcttagttactggagtgagtcagctagggttcaagaagtgatagtaatgcttttgcttatatcctgaacttctacataatgaaactagcattaaaataatttaagaagctatgatttctaaataaatagcagtttttatttgagtaaagtctaccttgaaggaaacatgcttctggattttttttcatcatagaaccatttttgtttatttaagtatttggtatttcccatttatacaaagattattagaagtttggatggttgaaatatttaatactaaatatcatttggatatttggaaaataacttgtaggatgggtttattctgtaaccctagtatttttttttttatatatataagcatttcatgctgaatagtaggaatactggatatattctcaatagttggagagaatgagagaaggtgaattagctggaaacagcatgttccttttatagagcatctatacagcttaatatagttccaaatcattttcttaaatatgggttaactgtacacatttatatatttacaccagtaacccttttttgtagacatacagacacataggtgatttcatataatcaatagcaagaacacatatttctgtattacatttattgcatttatttatttatttatttatttatttttcccttttcctccccttcactttcactctggccctgcttgctccgctgtattacatttattaacttagtattctttttgaaaaattattttatgtatatgagtgctctgctgcatgtacacctgcatgccagaagagagcatcaaagagagcatttattagatggttctgagtgggtgctggaaattgaactcagaacctctggatgaacagccagtgttccataactcctgagccatctctgtagctcccaacttagtatgcttaattagataggatactcagaattgtaaggttaaaaatagctgagcaaaaaggattcttgaataattttctcaaacaccttgaatattccactaacaattgttctacctatatagcagtccttttaaatacttggtagttagtaccatttgctggtattttctttgatatctctagctatgtatcagtgctagcctctagtaatcccttcttttaaaagtagtacatgttaacagtttcagattatgctgagtctgaaaataagctcaggttgataagattaagaatgtggacagattgaacagttctattacataaattggtgtttttatattgttctgtgtttttttttaaagatgtatttatttcatatatatgagtacaccattactctcttcagacacaccagaagaggggacatcgaatcccattacagatggttgtgagccaccatgtggttgctgggaatttactcaggacctcggtgcttttaaccgctgagccatttctccagccctgttctgtggggtttttaaaatttttaaaaatttttttattttttacttttttggtttttaagttaggtttgcctgctgaatctgaacctggcatcctgatttttctcagtatcctcactctgcccccatcccccaatataatagcattgattggattgtttagactggtgcatgacctactatgtattttaaaaagaaaaatatttagtgctttggggattttaatgggagtagatatcccatttgaaaatgatgactttggtgtgagatgtgttggatgatcctgtttgtttttttctgagctgggctcagtgtgtagccattgctagcttggaactcactgtgtagattggctggtcttgaagtcaaagagatgtgcctgctcctcccttgagtgttcgagttacagatctgcatcaccatacctggccaggcttcctgttaatgttagtgaagtagagaaaagttgatttcctatttgggtttttggtttttcttttgccttagattatcaacaagtttttttgacttaatattaagctgtagatatatattgcatatatatataaagttatagataactcaagtagaatagattattatgcttgcctctgtatactgtgtgtactacactgctgagatgtaacctgaaatagtagtgaagagttaagttttgtgtggtgttgagtatgaaacccacaaccttgtgcatttttccccctgagacttgcactgcccagcaactctgtgcgtgttagataaagactctaccacagagttacactgtttcctattaaaaaaattaagcccttaagttaacaaaataagttttaaaaattcaatgacatttgtgtgtggtgagggatagtatgccagtgagtatatgtgaagtaagtggataacctgtggcacttggttttgtcttccaccatgcttgtcctaggttcaagcactggtctaagttttggtggtgggtacctttttctgctgagtcatcttgctatcccagaattcctttctttctttcttttttttttttttaaatgtacaaagcaaaatttcctaccttcttcatttctgagtgttgtgtaagcaatgcctagaactttttcatctcacaaaattaaaatttattgataaccttcattgcttatactcccttcaggattctttttctattttgtgtggttttgtttttgtttttgctagactactgtatataactcttaataagtgttatcacataaatatagttggaccctccacccgtgggtttgctaatccagacaaccacagaacagaactatccaaacaaaccctgcatctgtaccgaacatgtttccctgttgatatttactaaatacaactcttagcatagcagtaagactgcattaggtttttaaaataacatggaaatgatgtaaaaaatacataagacgtgtgtaggttatagataagtatctggattttggtatctttggggaagaccaggaaccaagtgtttgtggatgctcaggacataagagtgtgtttgtcttatgactaaggattttttgcccaatccttaaggttcatccacattgtagcaaatagaatttttgtcagaattttcttgactcttaagaataatactataattaatgtacatagataagtttctttttaagactctttgaaagagaacagtaaatctagtcaggagtggttgtacatacctttattcctagtattcaggaggcagaggcagttgtattgtctgtgagtttgaggccagcctggtttacagagcaagttccaggtcagccagggctcttacatgcagaaactctgtctcaaaaaactcaaaagaggagaaaaagagtagtaaatcttaatttttgtttttttgggggggttttcgagatagggtttctctgtgtatctctggctgtcctggaactcactctgtagaccaggctggccttgaactcagaaatccacctgcctctgcctctcaagtgctgggactaaaggcatgcaccaccactgcctggctaaatcttaattttttgagatctccatacttttccatagttaattgtatcattttacatttttcacaatagttcacaaactgttactctgcctgtatcttgctgatccacccaaactcaagtagccttacttagccatcttaatggatgtgagaagatgccattattgttttgatttgcatttttgaatattatattgagcatcttttcatgtgctggttagctgttttagatacagtctttggagatgtatttaaaatcatgttaaacatgtactcgacacaaacacagtttttgttttgtttttgtgttgttgaaagtattgagggttgaactgtggccacatacaccctgttcaagtactctgccattgggttacaatcctgctctttaggatttattctggttattaactcctttattagatatctcacacatcttctgtcattgtgtaggttatgctttttacactgttgattgtatcctttggtgcatagaacttgtttttatatagttgagtttattaactttccctgtgcttttcatgtttataaaggtttggttactctagcattattgatgcatttcttttatagttttagaacacttggccttttatctattttgagctgattttaatatacagtatatataaaagatccaacttttcttttgtatgtggctgtccagttgctttagcactattgggtagtcttggcaagtctttttcaaaagcatttttaaataattagtaatgagagaggactttacacttatattttctctgcctgtatgtgctgttttagagaagagcaacagctggaaatggaatgcccaatcttgactttgtcattaaatcactgaatcacactgaataagcagctgtgaactcactgtacccatgttgttacagaatgaatgagaggtttatttaaatctgatataggtataagatgtctatggagtgtttagagacaaaacaaactaaaaaaaacaaagtaagccaggtgtgatggtgcacacctttaatcccagcacttgggaggcagagacaggcagatttctgagtccgaggccagcctggtctacaaagtgagttccaggagagccagggctatacagagaaaccttgtctcgaaaaaaaaccaaaaaccaaaaaaaaaaaaaaaaaaaaaacccgaagtaaaatgggcttggtagcataagccagacttaaattccaataggcgagaaggccagcctggtctgcccagtgagacactgcctcagaagcaagaacaaaacccaaagtaatgatgtgtagtagtttacctctagtttcctgttctgtttttgtcctttgtttggatttacaattataaaaatctagtgagcattaatgttgggttctgttattacatggtttgcaacctaatagcatgtggagatttttttcccttgaattttgtagttcatcctagaaaagcaggtgtgagagaaaaactaatataactttgtcagagttgtcttaatggtagctggctactttgagattgtatttttaaagaaacacattgaatggaaactgggttaagtattgggaggacgctttaaaagcagtatattgaacaaaaactgggtatgagtttagctgacagaaaccatgttgtctttggagtttttgttttctacaggtctgatttataaagagcttttagtagcatatgttttcgtcccaaaaaactggttatagtatttttttaatactgtaagtctgttttctaaacattcaaaaaattgcatgaatttggcatttcagaagaaaaatgacaaaatggtacccaaagaacatcattgtgtttttaattgtctgtgatgtcttaaatacaagaggcaagaaattctatacagttgaggcttctactgatcccgtgtgttgaattgatgtaagataatttatggtcagaaacaactaaaaattgtttcatcttgtttatgttataggttctttaaaaagttgtgccattatcattgccacagtttgtaatttgaaatttaaaattatttttcagccatgatgatctgacatttatgactaaaatgccttaatatagttttttttttaattttaggtattttctttagatgacagatgctcatacaatgaccccatcttttcatttttagaaattgatttccttatatgagctatttttgctagctggattaatttatgtaattatgcatgtcttactgattataaacctaatacagaagaatttttggttttgttttgcttttctttgtttctataactttaaaaataacatttacctatttatttgggaacaacatagacctttggaggttagagtgaaattttgcaggagtcagttttgttctttcaccatgaagtccccaatagattgaactcaattcaattggcttgctagcatgtacatgctgagtcatcttactcccctcccctcccccactcccctttagagtcaaggtcttaattatctcaggctggccttaattcactatgaagccaagggtgatcttgaacttccttacaaaagaattacttatctcctgcttatttgctagagcctatatgtgtatacgtgtactgcatttgtgtctggtacgttggctttggtttctctagaaaggaaggacagttgtaaatccaggagcctctgcagaagcagccaatactgctgattcatctcagccttgctcttgaactcttgatcctcctgcctccacctcctgattgctgtgttccaccatgaatgtttgtgtggtcctggggattgaacacaagctttatgcatgctaggaaagccctctactaagctataccacctctgctttgtttctttatttatattttctatttgagttttttaatgaaggttactgaatttttatatacttttgagcagaattctggtgacttcgtttttgtggtttagtttatcaaaggccttgaaaagttaaaatgcttaatttattaccattcttgaaacattggaacatttcaaaagatcacaattgatttgaaataggtcatatatcttatagtaactggtaatttgaagagtcttatttaaaagagtaaagataaaacagcagactctattttttgttttttgtctgtaaataatacaatgtgcgagttcctgtttgaaaatagcatttcatttagctgtttcatgtaaccttttatgtaacatttcatctaaatattacttgttaccttattggcttcaattaaatttcttcctctagtttggaaaaaaggatatggatgagtaaggggcagttgataggattttatgacattttaaggacaagattaggttaatataaattttacaattgtgtatgtgtttatcttctgagccatctgctttaggtagttaacatacggctaataacttgtcagttaattagctgatctttgcatttgagccagacagtaatagggcttacaatagtaacttccgtggaagctttgtagttaggtaactgtcatagtttctttttgtctaagatggttttgaaaatactacgcctcttgtcctgagtcagacacatgtgactaaaggcttgcttatggatatctaccacactggtgagtccttgacaggtcttatagcctctaatcttgtctgtctaccacgaaaatagaactcaccatagatgactgctgtgaatgttgagtgttactttattactgtaaaataattattttgtaaatttccttttggattttaaaaattgaagtaataggaatgggaagcaaggtttgctttaatcttgctcatcaccctagaaccttgtggtgatacagaaaagcaaaaccaaaaataaataaaaatctccaacttcccttgtaaagtagatatgctggtctgtcccacttaaaagcttatgttttaactagtactttaatctctctgatcttcaagtttctcatccacaaagtgatgaaagtaccaatcttgaaaagtttgtaaggattagaaatgacgattgttaattaacctaacaaaataactaccttgcatatggtaggaactaaattgataaggattattgttaaaggaaacacttaggataaaagctttctattgtgaaactgaccagacctagaatccctgtatactgtatactgcccaaaccatggcaagctgtccattacttcctgctgaagtcatagattttgctgtagggaacatgtttcttggttttaatttttagtatctttgagttctaaaattatattttaaaaaattaacttaagtcttttacgaaattttttatcttttcaaaaacataccaacagacatgcaaacacacttgtgaatttcaaaatagaaacatctttagtctttgaggaatctcacatcagtctttttctaggactgtatattttaggaatcacattggtgatggttagtgtggggtatattagaaagaagacaactttggtcaaggagttcaagagcaagatactccctttttgtagctttgtgtagaaaaagctattaataggataaatctatgcttttttttcatatgaaggatatttttggtatatactgtttgaaatttgattacttatatattgagatactgttatgtggaaaagacctcttaatttggtcagcttaatgacttcataacaaagcaattttttttctaatccttatacacgtttcacaaatgtgtacctttaaaaactatggaatctttcctatctgtttgatttgctcaaatatagtatgtgcttaacaaggatcttagaagggctatattttctataaaacttgattactagttttaaatatatgtaagcaaagatttattacttgttagctagtacagtttatgactgatgaatgacaaaactgatgttggtttgttaaaaaaattttcttagtctaaagctgttgaaccttgttagattttagagaacgtaaaatattcctaagggtattttggaacttcaagactaaacactcaatttaaaaaaaaaaaaaaagggtttaaaaagctttgaaactaaccttgtcttacccagttaagatggactcttaagccctagcatatgagaactaatacccatgttgtgaattttttcctttcaaaaatgtaaagcttttttgctaatttttgtgatctgtaatattgactattttttcactatatatagagagctgttgtagaattctatgtttttaaaattttttaatttaaaaaagtaaaaattattttacgtgaaaaggtgtttgggggagtatgtgtgtgcttgcatcacatgtgtgcctggtgccattgttggccagaagagagtgttgagttccttgaaagagttatatgtctgttagcctccatatgggtactgggaattaaaccaagaacctctggaagagcagcagccagtactcctaactttgagttgtttctccaggactcctgtgtttttgtttttaaagacagtaatgtgtgtaaatttattcttttgagggcctgattgtggcatggatgtttaaagagaagaaaccagaatcttcctattttgacatacaatcaaggtctgcttgttagagtatttaaaattgaatttgattgctgagttcaagaaatgatttatgaagctggagaagagagagatagagtctgatgagagcactgttctttcggaggacctagtcagttccctgcacctgcatggcagctcacagccatctgtatataactttagtcacaggggatctgacaccctctggtaccaggcatacatgtggtgtacagaagtatgtgcaggtgaacactcgtaaacacagagtgaacttaaagaagaaaaagggaaaaaaaaagaaaaaagaaaggaaaacaacaactagccaggcttttaccaaggtagtgcatgactgtggtagtgagaacccaaggagatcattaaacttgaggataggctagatctggatgaggcaaattgagtgttgtcctgtcttcatttacctgactttgaaaatatgtttatatctttgcatttattatacttttttgtcatcaaacatattgctgcattgattttcccacattaattttacctagtctctgtaatacaattgatatattaggtttttttatacatacgactcgtatttcttcagtagaattatcctcatatcttcatttctctttctgcaccagtataaaatctgtttgcctgctactagtttttaggaattaccaaaaccaatctgttaatctttttcaaactttagaatttagtttaaatgcaagaccgaattctttttaaattattaaattagatttcccacttgttccttaaattagcttttcacaaagtcaagaatttttttattattattactttttacttcttttatttatttacattccaaaagttgcctcccttcctgtcactcctcagaagagttctttacctcactaccccagggtgctcctccacctggccacaccccccccccccccccagcttccctcttccctgaggcatcacgtttccacaggattaagtgcatcctctcccattctgagacagcttcttgttaggttgttcaggctacccctgatccattctgtgggctcaaagctactatctcaggggtcccacagatatgtaactgactgactttaaatatgctctacaaaaccactgaaaaccccatgtttatttgaaggaatgcttatataaagcttgaaaatttttagtattagagtttgtagaaatgaaaggtttggctactgaaggccttagtaggaaaacttcatgtaagaacagagatttaaacggctctttggaatgagtaggagttggataggtcttaaacaaggaatataacaagtattttactagagacaaaacttaggtggaaatggacatttccaacatgtggctttgtgggaagatttgaactttttagggttaaggatctgactatctcatgtaactggtacaagaagctgaacatgaagagggatgccggtgattgtttccattctgtagggatcttgagacattttaatgctgttgtatatttagagtcagtctctatttgtgtttctctgtctgtctgtctttctgcatgtctgtctgcatgtgtatgaaagtgggtgtggatgaggaggccagaggtcagtgacattccttggttgcttctccagcttatttctttggaacagagtcgctcagtactctcagagctcacctattccgcttgattatttgcccagcaagcccaaggaatcatcttgtttttgcctcctcagtgttggacttacagatgtaaacactacttactagctttttttatgtgcatacgagaactgtgcaaaggtggtgttctaaccaacagaagatttcactttttagaacttcttttaggcgtcaatttgagaaacgtctacttacaagtttgcctgacttgatcaaaatgcttagcagatctccctcctttataatgattagattctaatcatataattactgtaactgtaaattttattcagtcaatagtatgtgctataatatgccaggaatcaagattagtaaatgagaagggaaaacaaaaaacccctgcagatgatttatgcatataacccttttccttactactggaggtggtctgtggacattagcatctcccaaacttgttgaaaacactgaatgaacaactatattttactaagatctccaactgatttttatatcactaaacttcatcatatgctggtatatgtcagatccagtaaacttcattcaatttttgctacctacagtagagagtttaaatgtctttgaatttctctccttttttgagatagggatcttactatattgctaggctagtcttgaattcagtctcttgttgtggagactgtaagtatatgtaatgtataagcatcttcagtttcagacaagttatacctacttgaaatttctatatttggtcttcctgtttattctttattatgtgcgcgtgtttgtgtgtgtgtgtgtgtgtgtgtgtgtgtgtgtgtgtgtgtgtgtggagggcgttgattattaggtgttcccaatgtttttgagacatggtttcattgaagctggagcacattgattttggctagtgaaatcaatgactacctcaagtaaatgcttggagagctttagcggtttggccagtgagttttagagatctgtttgtcttcagtcccttctgtcttggctgggtttacagttgtgctccattgtgcctgggttttttacttgggtactagatctaaacttaggtcctcatgtttgtgtgacagccactctactgcctgagccatctccccagtctgtctcttttttaagagttaacgtggaggctgattcagaagccttcatggagggctgcctccaagtctggtaatgtggcaggtggtggaaggagagaatgagctactaaagttgttctctgacttaacacatgtatgctgtggcatgtgtttcctttacccccaaattaacaatgacagcaacaacaacaacaataaaaaacaagataataataaattaaagggctaatatcggatgtgcttagttctcaactgggtaccatttgtatgtaaaaggcaaggttgtgtgtgcttttcccaaaacttaataataccttgaaatgatcattgtagcattgtgctagattagggtctgaatggaagacactgaagtatattcatcttatagagagcctttgatagcagcatgccattttgtttcttggctatcattgtttttatacatccttttccaagcatttacttgaggtgtagttatccttacttttaactccttgtcttagacttgtgctagttttgctaagctgaggataccctaataattttgtgaaattagtttttgaagtcctttccatgtactagccacttgctgagacattatgattatgggcactgtctttttaaaatactgttatttttctcctagccccctccccccctaaggcaggggacaagggagcaagacaatgactgcctctatgcaggcctggaaatcccttgtcttcctgactcagttccttagtgctagaacttgagttgtgtaccattgcaccaagcttttagactgttttgtatttagagagagctagcttcaaatgcatggctaattttccacatgctgtgatcacaggtgtggaccaccatattcctagagtctatctttattattccagtttgtactatacttgattttagccaaaagactaagaggtgattagtactggtttgtgatagccttcaaaaattcaaattactagacttcagctatgaggatactgtttaagaaattaaatattgggactgtagaaatggatcaatggttaagaacatttgctggtctgtcagattagggttcagttcccagcactcacttcgggtgtctcacagttgtctgtaagtccagtttcagggcatctgaactgtcttctgccttcctttggcctttgtggcaccaaccaaacacatgatgcatatacatgcatgcagaccaaacattattatgtgtaatataattttttaaagaaaatatgctttctaacatacacaaataataatgtaaaaacacaagagtatataaaaaagtgagaaatctgtctttatatctctagagctcagtactattagtatgtattctttttttttttttttcttggctttttgagactgggtttctctgtgtagccctggctgtcctggctgtcctctctgtagaccaagctggcctcgaactcagaaatttgccagcctctgcttcccaagtgctgggattaaaggcgtgcgccaccactgtgtggcagtatatattctaaaatgtgttttaaaatgtacaatatatgatatatgtaaattttactaacaggagagattgggttagtgagatagcatagtggataataaaaaggtatttgattactgagcctgacaaactgcgtttgagtctcaggacccacatagtaggaaagaacagacttcctgcaagctgtcttccaacctccacacattctctgacatttgagtatacacatacacaaattaaatgcaataaaaatgttttaaaaatgaaaagggagatgataaacattccagagggattgtgggcattcttttctaagaattggttttgtaactaaaggttaaaccagaacttaagccttgatatccttttgttttgttttgttttgactttagggaagaaacccctttttcttggagccagcaataataattacaatcactgatgggagcaagttgactactactagtggtgtccaggatgaggtaagtcatgtgaggtgtgtcacatggatcatagatgaaattgagacctatttgtgtatgtgtgtaatagggtattggatgctttgtagtacatttactctttagtaattggtgtagtttataataattcatctccagggtcctctacctttgttcatagcagttgtcattataatattttcttgaataggaatcctttctgtgcagagtttgtaagtgtacctcctgcttccattaaaaacatcagttgatagtgaggacagtgtcagtgcctacacaatagtaaaattcttattttcaggttaaaaagaaaaccaaacaattctaataattttcttattttagctgattatggtgatagcttttaactacagacagaacaactgaagtaaataagcttataacaaggaaatgtttattttaactcttcaaagaggtttcaatgtataatcagtagccttgagagtttgagcactttggtgagacaaggacggtgggacagtgggaaagaataagctgctaacttcatgtggccagtaagcaaagggactacagtcagataacactttcaagattctgctccaagtgacctagctttctccgaccagaccccttttcccaatgttgccagcatctcccagagcttgaggccaagacttaatacataggcctttcatagacatttctgcctgaatcatatgtcagttgaggtttttagtagagtccaggcgggaacacaccaccaagagtagattaaaactagaaagagtgaagacttttcaacagttatgttttctcttaagtcagatgtagtatcgataattcagagctaatgttaattactctgtaagtgaattatgtatgctgtagtgtgataaatccattaggttaaagaaagcaagctttatagtgtttttactgtatttgaactgttgttaagtgttttagttttttcttaacatgcaaatgcacaggtgatcttttacagactcattactgtttgcatttgttcttagtttctatgattagagtttgaaatggcaaaggtacagattttaaaaatttagaattaaaatttaatcaaagatttggaattcatttccattcctgtgacactgttgaatataaattatatggagtcagagcatgtgggttttattcttaattcaagtacttccaccgtgaactttctaccagttgacctaattttcctaagctctaccttatcaatgaaatactgacaataattcttgatttccttcatagggttgttgaaatgtgtaaataatggatgtgaaaatgtacggtgggctataaagacaaagtgtattgtgtcattccatcatgagataatagaaccagtgcagaacttagattacctaattttacttagggggcaaatgctagaattgctttgtttcagcagttaatatttaaaagattttaggaataaatattgaggtagcactgaaaaaaagtagcctacttgatacagcctttttgaaagtgagatgtaatgggttactggacttccttcttagacgtggttgatgtgtatagctccttatagttctgccactcatagtagtagacaagacactgtatctataatcacaagcaatagcaatgttacttagcttgaacctagaaactatcaaattgacttttctttcttaaccatactaattttattatttgtattcatgttaattttatagaaattccacttcttttgatggttgtgttttaccttaatgattttgattaaaatatttctgtttttttcttataaaatatgcctattgtaaggttattcattcaaggcactctttctcatgccttttgtaaaaatgccttcagggatgtagttcatcccagtatacctggatctggtttatttataaaatctgtttataggacttctagcttcaagatatcttgaaatgtacatgagggttggaattgttgaactttctttctgatttcttccttaggaaagatattagagaaatgtcactatgtttttatatttcaatattaaattgcaaataagattaaaaagattttcctgtgggcagagatctcaacctttctgttctttttatctgtgaaatatttaacatagttctaagaatagaatttacatgaaagatattacagatgttgatgtattgaatctgataggaagcttaaaattgattccttttgttgcttcttacctaaagcagaaagttgatttatttttaaggcaaacatttttgattatgaagtttgagcataggcctgtgaattattttggtattaggaaagtcctgcatgtttctttctctaactctctctctacaacccaatactgtggatccacccagggcctaggctagtgctctagcattgaacagtatcactactcttcttgcccccttattctcctctcttcctccctttccccctcttccattctcctcctccctctcctcttccctctcatcctccctctccccctcctttctctgtcttcttgtggatgcgtatatgtgcatttatattcatgctcagatcatttttttctactagggggtatcaattttacctgtatgtcttgttatgtttgcctttgccaaatccgaaattctctttttgtatttgtaatgagtaaatgtgtgataaattttcatttaaggaattttacagaatattgtgtatgtaatttttggtggttcatggctgcaattttttctttttctttttaatagactgtagcactggcctcaaactcagatcctcttgcctccacctcccaagtagttagattacaggtatacactaccacgtttgtctagcagtgactactgtgatgtaacttatttccatttgtatgtttcactctcatattttttgcttgagtggtgtgatatctactgtggtaaatcatatctgttctgttagtacaaaatgagtgactctgctgctttcacagaaacctcattgcagatcatataggaagtagttcatttagtctttgtcttacagtttacaaataaggaaattgagatttaaaaaagaaccaaagtgatttgattgggttctggtctttgttgctgccaaatctatattagaattcatctaaattacaatggtgtaccagcataatggtgctctcctttgtcctggatctacccaacacctttttgattgtgttgttgaatgtgtttagaatttaccttctatgtgtgtttgtgtatgtgcaggtatggatttagttcagaggttgatgcaggatctcttcctctattgctctctaccttattgttaggggcagggtttcttcctgaatttgtggctcactaacagcaagatggtcagcaaatctcagggatgctctgtcttcacctctctccctctggtgctaggtttacagatactcactgtgcccagctttttatgttgatgctgggaatctgagctcaagtccttgtgcttttgagacaagtactttgccttctgtttgaattttctttcttttctttttctttttctttttctttttctttttctttttctttttctttttctttttctttccttccctttcccccccccccctttctttcttcttcctttcttttttcttctcttttcctcctcctcctcctcctccttttgtggtttttcaagacagggtttttccgtgtggtcatggctgtcctggaactcactctgtagaccaggctgacctcgaactcagagatccgcctgcctctgcctcccgagtgctgggattaaaggcttgtgtcatcactgcccagcttgaattattttcctgttttagctttctgtgccagtatgatatagataattctgttcttaatttgtttagtctccttgaataactactaagctaagcatttctaggcaatgagtatgtaacaggataagtttttggtgttctgtttcatgacagttttttaagttcatgttttttgagtgagagaaatggtgatttttaagtataagcactgaaagggtaaactcatcccatctcatagacactgcttcctctcaagcagttggcaaattctttgtaacatatacaatctagtttgatctaaagatcttaggaaaccacggactgtgtatgggttactgcatacatttgtgaagtttataaaacggcccagtgttcaactgttttgaatatagaaaaaagttagttgaaatatttagagccatattataccttggcctgagtatgttcaggcccaattttttttagcaatgtgtttgtcaaagggataataaaactgttctgcactctgtgcacttagcaatatgttgaggtaggagagaagactgttttgtaccgtggatgaaaatcttgtgctatatgtgatcatcttacattaattaattaaatgaaacagaacttaagttattgcttgaggtaacatgaatattgtcctggacctttgatgacttttagattggaagcattgttctggccttttgtgtgtgtttgtgtgtgtatgttatatagccatttagtcaaactgattgtctccagtattctcacttaagggaaatgggctatttatagatttgaattctgaaatacaaaggacactatttttcttgattctatagttcttattttatgatgttgataaatatgtggccaaatacttataatgctaaccatatcagcattctttgtgtctcaaatgttttgataaaattaccaaattataattagagttgttttatttacttaagttttagagatagtgtctctctttgaagccaagttcaccttgaactcatggagcctaggctggattcaaatttggggaagctcttctcagcttcagcttccctgaactgaagtgaaagtgagccatcaccgtgctttgctgaaaacttgtttctttttattttttgcaaagattctctggagtccagagctgcagtgggaatgtgttttgaacttatttcagaagtacattaccaagtgcattgttcagtaaggcagcagaaaaaaattctgctgaaacacttcactgtagtgaaaccattattttgttcattcccaaaggtgctaacactagtattctatttcaaatattgatatttctatgtatagatgaatctgttggcatatttgtattgtgattgccacgaaggtaatgtttttgagaaggcatttgttgtcaaaattaaccattggctctgcaatactagctaggtttttaaggccaagctggacaattacattttctttttcaaattaattactttattttgtatacagtattctgcctacatgtatgccttcaaggcagaagagggtatggatggttatgagctaccatgtggttgctgggaattgaactcaggacctctggaagaacagctagtgctcttaaccgctaagccatctcttcagcaccctccccctttttaagatttatttattttatacatatactgtcactgtcttcagatacaccagaagacagcatcagatcccattacagatgtggttgctgggaattgaattaagaacctctggaagaacagtcagtgctcttaaccagagccatctctccagctgccacccataactacttttataactttctggagagatgttcacttaagacacttgtatagaaaagtgtcagcagtctcagcttatgggttcagttgctcttatagtctgactcatcagttttgaaagttggcacaaaaggtcatcaagctttgagtttctggatttggtagcagcagtttgtgtttttctggatcattctatacactacacactgaagatggttttactttacttgacagttgtgtgtcatcacacatttgccttcttaatgattcaaaagtaatatagattctcatatctgaagtgattgagaaactgtttcttcactccccaaaatgttcttattcactgaacacaaaaatgtttgtcaaaggttactataactattttacagataaagacttaaatatgcatttagagtgggttccctactctctgggatacttagaacgccagacaacattctttgttttaaaaaagagtgaaagaaatcttgaggaatttcatggtgtgataggtttctgagtattgtgttatcctgtatgtagtaacgtcttcatattggcattaatggaacctggtaacttttaaggagtcatatcttttctgtgatgaaatatttagatttatactttgtatgttacttctactaagtcagttttgtaagaacacctaagagaatttttcaatatatatagatcacctatattttatttttctatctatatttttgcctctattgtttgtacttatagttaatagtttcttgaaaatgcatatttataaagtttgacacaattccttacagtgcatattcagcagttcacgtatatattactgctgaaaatagtaaactattttcaatatgtaataagaataacccctaagagaagcttctagacaaacaattaatagaaatgttgcttcttagcctaatgaaagtggcctggcagccctttgtttgtggtaaggtacatctaaatagtttttattcagagcatgtgctgtgttggtcttgtgggccaagtctcacctagagacatctctgtcactgctcgtagccttccatacatagactgctgttattcttactgttatgctaagcttttacatagctgcattagaatcatgaagtaagtttataaaatatacaggtctcaggtcttattatggatctgttactttagcttggaaatggagaagtctgtattttgttaaacatgttccaattgattttgatgagatgaacagtcagatttcaaaacacaaactaattatatagatacttttttttttttacataaaagcatgtggaaataccttaataaacagaataaaaaatgtttttaacttaacgctagcctagatattctaagatataagtaattcttgatctttacagttgtcatacttgggatcctctccaaggtttggaattctgcttatgtgactataacagtattgtttttctaatctgttaatatggtttagaataatttttggatggtcttaaaacactgacttcttgtcagagtaaagttaactgcttagagtgtgctgttcaagttgagggtagagaaggtgagttgccaggagaggtgagtaactgattaattaatctgccattactttccttgccttagaattttgattacatctaaaggatattagaatttgggtagttttactatgctatatttattggtttttgaatggctatgtaactagcgtcatttcaaaaatatgtatctatgaccctgatgattctgtttgtcaaaaattgatgacaattaatgattgactttctggagttgctacttggttaccttccagaatggattctttaaacttgagctattaaattatgctttagtgtagcattatttccctgtatatttggctataccagaactgtggtattcactgtacatatgtataggtctctctctatattatagctacttcaggaacaaagatggaagtaagactcttgcccttagaaaacatacttctaggggtcctataaataaatttcttaaagtaatatctaagcattatgtttgtgtgcatgcatactttcctggggataagtccatagatttgtcttgtctttgtgggttttatttatttatttatatttattcatttatttttatttttttgtgtcttagttagggttttactgctgtgaacagactccatgaccaaggcaactcatataggacaacatttaattggggctggcttacaggttcagaggttcagtccattatcatcaatgctggaacatggcagtttccaggcaagcatggtacaggaggaactgagagttctacgtcttcttctgaaggctgctagaagactggtttctaggcagctaggaggaggatcttaaagctcatgcctacagtgacacacttcctccaacaaggccacacctacttcaataaggctacaccttgggccaagcatattcaaatcatcacatttggtgacagtgttctggtatttaagtctaggctaccctgaaaccttcctgcctcagctggcccagtggttggatcacaagtgtgcattgttatgcccaatttattagctttttttttttttttttttttttttttggtttttcgagacagggtttctctgtatagccctggctgtcctagaactcactttgaagaccagggctggcctcgaactcagaaatccacctgcctctgcctcccaagtgctggaattaaaggtgtgcgccaccacctcccgaccaacttattagctttaaatcattttcaagcacattaaataatggtctagtactattcctaggcttccatcataagtgtctatataggtagtaatattgttgcctggatatggaggatataaaaaagtagaaataaggaaaataaaataattgtttttatatttggttaccttccagaatgaattcttcagatctgagctattaaatatgctttagtttagcatttcttccttgtgatatatatgtttgcctgtataccaggcaaatgtggcattcactgtacatatgtataggtctcaatattctagctacttcaggagcaaagatggaagtaaataagactcttgcccttattcagtattgaataggttgtttactattttaaggatgctgtctaggaattaaaatctaacttgtaaaacagtcacctcagtcaataaagggctgaggacctatgaaaatgaaaatgctgagggtagagacagaaggatctctggggttccctagccaactagtctagcctagtaggtgggctctgggtcagtgaggggtagacagataatcctttagttttcatgtgtgtacactgaaaaaaatagttagcttaaacctttacagatgatagtatataagccttcaattttatataagccttcaattttgttattcttctgctttatccttctaagtgctgtgaatattgctacatatacccagagtggtcaaggtcatcccctgctgtccagttgtacttcccagctagtcaccagtctggcctattgtttgtattttacttttaaagattaagtaattttcagacagggtctcattgtatttccttatctggtatagaactggctatatagaccaggctgacctctcagagatctgcctgtctttgccttccaagtgccggaattaaaagtgtatgacaccacaatccagccccattgttttttatttttaagaatataatgatgtgaaaatttaaatttgcttatttaaagcagctgttagtattgatagtcaaaaaaatgttaaaaccagaatattcttctgtttccctgccaccgtctttgtccatttgcgtgcacgcgtgtgcgtgcgtgcgtgcgtgcgtgtgtgtgtgtgtgtgtgtgtgtgtgtgtgtgtatacatgtttatcagtatgtgcatctatacccaagtcaattttctgttaaatgtagtctattttggttatttttctgacttcctgagtcagattgtaatgtgagaaaattaaaatgtcagtgtttggattcctgatggccatactaataaaaacgttaggcacctagttactaataaatatattgattatatctacttagctctcttcccactattttaaaattaatttccacttttgctgttttttgggtataatacagtagatttaagttttctagatttatatattcagaatagatttgatgaggtgattgaaacagcattggaactttggcctttataccaaagcaaggctacattttgatctagacaaggctgttttggtatattttccccacactcttttcagattgaattactgattccccctcccccttgttttgtttgttgtggttttgatgttttttttcctttcagctaaaggagcagcccagtggttttcaagaagtgccaaagtgcactgactatctcatgatgactggtgcctcagggagggtcatgattcctggatacaggatcgacctgatcctggatgtcacttcaagcagtcatatcgtggggaaaagccttgtctaatggctagccttcctcaaaagtctgatgctagtcatctcggaaggcctcagagaaagccttaaaggtgagcagagtagagtgtagttctctctggggactgtgcctttttgttggagaatatgattcaacatagaatgataaccctaacctgacttttcaggtctaagtggtaaattaacctgaagcttaaaaatgtgttgttgatgatgatcagaccccaacttttgagttactagagactatcttctgagcttaacagccaatatagggagagatttggtatttcccatattcttcagagatttagcttaatatgtgtttgtctaaaaggacatctcctttctattgtagctaaatgataccttgatgtcaaaattgcattcagttgttagctacagatagaattataaaacttagttcgtgaatgaatatcaggcagttaagcttcagaggttggttaggacaagtttacatttgatttttttctatcataatgttttgttttgttttgtgcttttttttttttttttttaataaacatagttattgctgggcatgatggtgcatgcctataaaccccagcattggggagggaggaggattaccagtttgcctatgctatatagtatgatcttgtcttaaaagaaaaatgaaaagcaaaccaaatgaaaagcaaaccaaatgaaaagcaaaacacacagtagttatgaagcagttcctgtcttattgcattgaacttggagaatattagtattgcctccttgatcagcatctatcctcaccgctacgattcttaagagatgttttgttttaattttagattactttctctgtaatgtgaagcacttaaagaacccagtaattggttaataacctcagtttctgagtttaagttaactgaaagatattgagaactactaatttctttttattgaattactttttactggtgataaattatatgggtcatataccgatccaagtgcatgtacattttaaaacttagtatgtatgtgtgtatatatatatatatatatatatatatatatatatacatatatatgtatatatgtgtttgtgcatatatatatgtatatatatatatatatatatacacacacacatacatacatacacatatgcacatacatatatatatgtgtgtgtgtgtatatcaggacatacaatatagcccagtgtatcatgcttgtagatagttaggaggccctggattcaatatcttatcatttgggagaaaaatcatgtgctttatctctgtgtgtatatgttctgaaatttgttttctgtacaacatgaactgtgatataccagagatttgtgttctattttgctttttgttactttgatgaaaatactgacaccaactttgggagtttacttcatattataagttatgtgcatcattgaaagccagggcaggaaggagctcaagacaggaacctggaggtgagaattgaaacagagactgcagaggactgcagttcgttggctcacttcccttgacttgcctcccttggcttacctaactatttgtcctctgcatgacaggcctgcctgtccaggggtgagacttccaacaattggcctgggtcctgccatatcagttagcagtcaagaaactgccctttagacatgcccacagaacagtctgatagaggcagttcttcaaatgacattcctttttccttctgtgtcaaactgataattaagaatagccttcatagtttgtaaactttttgagcctgcatggtgacaagaatacccactcttgaaagttgttctctgactgtcatacatggaccttggcacacacacatgcatatatatgcacacacacatgcaaaatgtataattaaatgtaaatttaaaaaaagggataacagacattttcaggtaacatggtctttattagaattactgaattcagccgggcgtggtagcgcacgcctttaatcccagcactcgggaggcagaggcaggtggatttctgagttcgaggccagcctggtctacagagtgagttccaggacagccagggctatacagagaaaccctgtcttgaaaaaccaaaaaaaaaaaaaagaattactgaattctgctgttgtggaaaagaaccactcaaacaacatattaaggagtaaatactgatatgtttagtacagttttgttttcagagctagattgggctgcagtagactttggaccatagtttggggaatcctgaaatgtcctctattttgtactccactgctgtagaccatgggctgtgttactgtattagatgcttctcacaacagctttggagtcgtctttatccacactattactctttaatgcagtgagcacaataatactagtagccagaatgtactcaggtcttactgaataagtaactagaggactgcgctgtagtttaggtactagttttgaggaggtgactctttatgtgctggacttgtgagctcttaataggtcattttagtttgagagcttatattaagttcaaaaatgttatttttttacagtctttccaggcatcgctctttgcaacccctaccctatttctattatttctggctaatagaagtttgtattgaacttccattttcatttttgttttaaatgcattttcttttctgctggcacaatggcacatgcctataatcccaggactctgcaggtagagtcagacaggggaatctctgtgaagttgaggctaacctggtctgtgagctccaagcatgcttgctgggcctacgctgagacccttttttctcttctaccactctgtccccactgtttgctaattcccctttctcttacgctcgttattgttgtttgggggaattttctttaactgactttgatgaagggctgtgtgtgtgtgtgtgtgtgtgtgatgtatgcatatgtgcagtttttattttaacgtgtacttgtgtggacatgcatgtagtggctagaggttgatgttcaagcgtcttcctctcttgcattccactttattttttgagacagggcctctaatggaatctggagctctaattcatttggacttcctgtccagaaaaccacaggaatctgtgtctacctagcagtggactataggtatgtgctgctgtgcttgacattttacttgggctcagaggctctcaggtcctcatgcttgtatggcaagcactttaccaactgagccatttcctcagctctgtgtgtgtgtacatttgaggagaaattttataatagaattaatcattttgaggtgaacaatattctttggaatttttgtatataaatattgaatgtgtatacatacatattttttggtacagtgctgagtattgaactctgggactcacatgacttctgtagcaagctctaccattgagctacaacccaggcccatttccctatcttctcttttttaatagatttatgtttggtaccaatgaaatccataaattctaggataagcaaataactttctcatacaaccagatgattttagtttgaatatccctgcctttaggtttgttgttcttagaaataattaggaaaattctaaagattgagattattagaaagcaaaaccttagagaattgatgttgagggtctttgcttgtgattgataatatgaaatccagaaagcagaagacccagcagaagggaggcatctattgggaaggaggaaataagtctgtaaggactaagtacaacttactcctccttgtctctgatttgtgttcgataaaagacctaactaagatagtattgtatttgagagataaactttaagaaatgttgaagacattaaattctcttttgaaaaaattttatctttattatctaagcaaatctgagaaactgggactggagatactagctttctgtttagagttacataagcacttccattagttttataaggacatataagttcgtgcccttcctatagtagcattagtaccttgattgctttttgagacagggtctcatgtagcgtagattggatctcctgcctctactttccaagtgttgggattacaggtgtgtgccacttgctaccatacagggttggtttctctttgaatgcatattttctccagtaaacaagttgacaaattaaccaacctctagttcagaggtcctcaaactggggttatatatcagatatcctgcatatcagataatcacattataatcataacagtaggaaaattagagttatgaagtagcaacaaaataattttatggttgggggtcagcacagtatgaggaactgtattaaggggttgcagcattaggaaagttgagaatcactgctctagttcaatcttggcaggcttttaaaaattggtttacttgtctagttggaaagcagtaacaacaaaaatagagagacttgtattttaaagacaggtctaattgggtagtagtccctgaagtagagggccttgctccatcctgtgctggactccattgcttctcttaggtgaatagttgatgacaaatgggcttttacaaaacatcctgcaaccagggtttggctttcaagaaaagcagcagactaggagagtgagaggcttctttatttacatggctactccagacttacacaggacagcccctatcatcattcaccaagtagaacttgacaacttaaccaatatctggttacattgagattggggcttggagaattgtctagtagaagtgggaaggagaggttgattagacttggaagaatctggactgaaaggaatataaagaaattatactttaaaaacttgagtgtttctttgtttttttttttttttgtgtaatggcgtgttcaaagcttacatttttgtcccaggcttagatttaggtcaggtttctcatgcttaacaaatgactatactcctgggtttaggggtgattcttgttattgtatttgtgtctgtatgtcataacccctcctctttgtcaatagacagaattaggatttttttaaatctgaaagagaagatagattatgtattcatatttatatcaacttcaaatttaagttatttaaaatgcactgttcaaagtgttgttaaaaacccaagttttgaatcgtggctctgcatctaattagagatttaagtgtattctctcttgttacaaggtttagtgttctttagaatgagtataataatgacatcttaaggttacttggatttttagttgttcccactatcactgaacaaagatgagacatttaaatcttaacaggggtataaaagttgtcttttgaggtaatctgtgtacctttagacgagtgggttaaaggtggcatgtagcagtttatttagtcagaaatgcctgggtaagggaccatggtctgcattatttaaaacccagagaacataggattctgtttttctaagtcttgaaaatttccaactttttcaaattgctttatctaacataggggctttaaatttggatttaaacttggactcaggattgctaaatcctacaagagactttacagacattctgattgtgagggaactcagttggggaaggaatgccttttagtattttgttattctcatccattattagtgtttatttctcatattttcaacatctttaatttctcagcagtgtttatagtagtcagtatgtgagcttggcaaacctgctgtgaattagtgttttacaagtctagtacctctatctgtatctggttacaccaggccagtgcatactctcccaaaagtagatggtaacttagtggtacttccgctgaatatttgctttagagtaatacctcaaaatgatgagaatgtaaattctgttttaagtttatgatttttaacagaactattttgctgagcttaactggagaggggataataaaagtaaacttcccttcctgttctgtctcctttccgcagaggtttagatttgcatttccagttgtttgttctaaaaagaaggttaaaaacctttttattgtcgaaattttcaaataggtacagacttaagtaaagtgatggacattgagaatctttgttcagtttctgtaattagctgtattttgctgtacagttttcagcttattccacacagctatttaagtcagagcccctagctttaagtcttacagaaacttaacataaaattgctttcctaattcttagaaagaagacaaaacaaaacccaggtgcagtagtgtatgcttgtaaacttagtactctattgtaaaggccagagaggattgcaacctggtctatagagggaaaggggatctgaaaaaaattggccatatcattacctggatcaatgaacatgtaccagacagtgtaaataaatccaggttaaacccccaagtttctgaggttaaattcaaagcttttaagtggtattttaactgttttagtaactatgaaaaattatttgagtaatcgaaaaattatttcaagctaacttaaaatttaagcattattttgacttatagtttgcatttcaagtaaagcaaatatgaaactattctaaaattaatccattagaaaatactaagcaaatactaatagtctttaaaatatcatttctggatgtacttaaactataaggtgttttaaaagtcaagataactacatactgtgcttaaattttaatggccaaaaggagtttagaaaagctttagaccagtttgtctactggtctatgagtatggcacagggagtgcacctgtggaacgcagaggctaactgaagagtcagttctttcctttaccttttcgtgtgttctggtggtcaggctagtgaggacaagctctcactgctcagtcatcttactgcccagggaattttttatgtgtgctcaatcttaagtttggggaagcaaagaaacatactaaattgttgctattccttagactcttaagtaataggtaatagatttgtaaagagagttaaataaaacaggcaatctgatggaatgacatttactatataagttcagtaaatggagaaatcttagccaacaatgatttttggctggctaaaaatgatatataaagcttttgacattggttttctttacctgtatgctttaaattagctttctgacttaatagtttatgatttattccaggttaaatgttttatttatattctgaatagtttggatatagttaacaaaatatttatttatcatatgttaagtacattgtagctgtcttcagacacatcagaagaggacatcagatccttttatggatggttgtgagccaacatgtagttgctgggatttgaactcaggaccttcagaagaacagtcagtgctcttaaccactgagccatcaatccagcccccatagttgtactcttaagagttgataatgttgcacatcttttgagaaacatgttctgatttgtgttgatgggagatgtttaaaacttagatcatagtttaagtcataattcatatagtatggttttgaatatgttaacctctcatttgtagaggtaacactaaagttgtaggacacaataccaggctctatatcattcctttgtttttgatgtctatcaggttcttacctttagtaatccttagtctgcttcctcttttctttttccattgccactagttatttagtgccgcagctcttactcctgcctgcttgccttcctgctttcccacctttctctctccctccattccttcctccttccttccttcccaccctccctccctcccttcccccctctcttcctttttccttcattgagagatctcaggcctaacatatgctagacaagtgtttgtgcattctgtctacaacaaaccatttgtttatttttatttttcaactgtgtatgactgtgtggttatgtgcacatgagtacaggtacctgaggaggccagaagaaggtattggatcccctgcactagagttatgggtggttatgagctgcatgatatgggtgttgggaactgatttcaggtcttttagatgatcagtgagtactcttttaacagcttagctatatgtctggccctctttttcttcttttaaattttatttagtttttgtatgaatgaatacacatgagtgccatggtgcacgtgcagaggttgttttggaaatcaggcttggtggcaagcatctttactagcactcttgctgtcttggttcttttcatgactacctttaatctgccacatgtggcagaatgtctctaaaatatgccatttgtgtatatcattctgctcacactatttcattgctttcagttgttcagtagagtcctcagtgctttcacagcttagctagtcacattattaatcctttcattttcattgagtcatatttattgaacaactcattgtctagatacaccagagtctaagatagaatggatggcaaagtgaaccggagtcctgcttttggggtactggagaagatagcaattttaaaaaataattaggtagatgaaagtaaacttgcattcaccacttattctctcaaaatggagggatatgaagtgatatctagctcaggctttgaggtactgggctccacctctagtactgtaaacaaattagggtagagtagggaggaatgtgctatcaggtcttatagtaactatattagatctagtcagaggtcatgggttgtaatatgtgaagagaagccagtgtggtggctcagctctgcagttccagggcttgaagctgaggtaggactcctgtgccagcttaggctgcagaatgaggctttgtctaagagaagaccagaagagagtaaggtttattatatagaatatataaatgaagatcatatcaggcaggggagtccttttctctaaagggtttgttttgagaatgaggaactgaaacaaggctaatggcacttggagcattgacaaaaaaggggattatagtatatggtggaaaagaagtttgggcctcattgtgcaaggagcttgaaccatgctaagtaatgatggtgctaatacagaagaatcaggagctggcaatgtagctcagggtttgagagcctgcctagcaggaacaagacaggcagatgtcattcagagttctgtgcagtggtaaggaaagaagagaagacgacaagtaagtgttgaaagaccaggtaggtgctgctgttaattttagcaattttctcaagtaggtggtatggtagtaaaagagataataaaccccacattttaaagaaatatttaggaagttaaattagtaaaattcactgtcataaattgtatttaaggcttaaggggcagtaaaatggcttctaaagaactgtgtagatgatgataatgatgccattcatttcctggcctagtgaatgttggaaaacttacagaagaagagaaatcatgactttagaatgcttaggtttcaaggtatcttggaatcatttaggaatgaatgtcagatagagaatttggtattcagaggagagaatttggctgggcatattcaagtggaatattatctaaatttagatagtaattcaacctgtgagtaggttagtttgggccaagtataaactggcaagggcctctgattattaagccctacagatctttaacattttaaagttttgatatttgggattgaggttgagctgaggctagaagatatctctagatttcatgatgcctgtagttatcaattgatgcataacataccattttgaaacttactggcttaaaacaatttattatttctttggagtatatggctgaggtacctggtttctctcctggagcttctttgtcttcatcattcagcaatctggttcaaatttctttacatggtttgcattttccacaaaggaggaataagcctctttagacttaatcagactcagttcagaatattttggctatactatagcagtcgaggaagaatggataagaattagtgccgtttgggtaagtggagtgggagatgaagacaagtacctattatttttttatattttctttaagcttgacctgaattgttctgtgatttccctgaaagttaagctgtttctttgtccccttactaaaattgtaaccatttatttgtaagcaactagctgaagtctacttgggggttatggtaaatatttgcttttattctttctcctttctccatcccctcttcctcttcctgcccctcttcctcacttttgtctctttttcttcttggtttcctttcttttctctatggctctgcttcttttggagggaaggtgctactccataacccaggctgatctggaaatgatggtaaccctccacctttagccttttgcccaggttataggtttgagtggctatgccagccaggcttaaagaggttcttaaagtctttcctatctgttctgaagtttagttttcagtcttaagtgtgtgtgtttgtagggggctgttgttcctcctctgtctttactccatcaattccccagtctccatgcagttgtaagccttagcaaagcttttcagttctttactcttgcctggggtgcctttcctcatttcccctaggtattattctgtactactgctgtaacatgctgcagttacttacttatgtgatcttgaaggtaaaaaaatataatgtgtaacatgttacctttcattaaataacccgagtcacaacttgatttatgatctattctgttctaaaaaggtctcacttgataacatttagacctaattacatctttgatgctctgccaggcctatgggtactaggccgcagcagaaactacaaaaaaaaaattagggtttgctttgttaggtaaaacattacaacaaatgataaatggtctttgtatacctcaataaagtgagaatttaagaggttgtattttgagtggtcttaaaaggaattatgcccaatataagtaaattttcattgtgagtactaaacaggataaaattggttttgtgtcatctgcacagggaatattttatctaccctatctgtgttctaggagttgggcagcttttgtagcttattactttatcctctgtgtctggatacacataaaagtgctatttggagagataggtatgtacacagagtagagttttcatgtatttatggagatgggactccttggtttcatgagctatcgaattgttttttaaaactctgttttccatgactggcagggaacctactatgaagatcaggatgaccttgaattcacagataatctgcctgccttctgagtagtgagattaaagacagttaccaccatgcccagctccctcacacttactttataaaaactgtttatgtctctgtgtgtgtatctggtgttgagatggaggacgcgttcactgaaaggtgcttgcactccggcttaccactctcattattttcttcagtttcattttggagatgaaagaaaagaatcagattgtcttttcttccctcactaaactagtaagataggcagctaagtaacaggccattaaagctcagatgggaagtactgtcctgaaaggacttgcagttactttagtaatagagctggttagcagagcatgccgagaagtgtagtgtcccaagtgttagtgcagacaatggtgtgttttcagctgggaaccattgaggttacaactgagaaaggtctacctagatgccagacttagagattgctggaaaacaatttcccttttattgttttctggcttctgtttatttcttacattttgcaatttaaaatgtagataatgtgtaaaaataatggttgtttgagattttatacattttccttagaaactgaaacagctaaaaatatcttcaccatatggcagctgacaccattcagaactctagttgcagggaatctgacatactcttctgatctgcaggcacacacagtacacacgcttttatgtgtaagtcaaacaatcatgtacagtaataatataaaataaatcttaaaataaacaaatcaatttaaaaactgttatctctacctttgcttatttggcttttaatatctttatatatacctgtccctcaaacaaacagtcaggcagacagatagaacttttagttcaattttagcaagatcacagacaaatagaatctgagccattatcaaataagaccctcaagaatgggagataagccagtaaagtgcttgctatataagcctggggacttgcattttgggacagcaacaagtctgtaacttgaggactttggttacttttcccataagtgactggccagtcagtccaggcaaaaccttttgtctccatgttcagcaagagactgaccaatgaagctatgaaacattaacttctaccacacacaattgataatcaaataggctcctgcactttaataaagactaggtttgagcaagtaatatgataagttgtcatcagcttgctctgccagttgtttcttaacaatgtttgaaagtttagtttttgtttttgtttttgttttttgttttttgagacagggtttctctgtatagccctagctgtcctggaactcactttgtagaccagaaatccgcctgcctctgcctcccaattgctgggattaaaggtgtgcgtcaccaccacctggcgaaagtttagtttttttaagaactcaaggagtcccagggaaaggagaaggggagtaagggagacagctttccttacttcagaatgaggctggatttgcttttgtattggccaccaaaagaacaatgtatttggattgatgctgttacttgtttatagtaacaatatagaaaacctcacttgtacccaagttaaactgtaggtataagtagtaatttcctttgcgtatttagactgacactttgacaagtattgtgaagaccaataataaggttatgggaaaagtaattaagtcatgtgatttctccaattttcaaagtttacaatccatttttgactttctaaatttaattgtatagcaggggttgtttgagggcattctacaaactgatggttctgaatatataatctcattacatcttatctttctctgcaagtatagtaataatagttttttttatccccatttacttgttataaatatatggaaatcttgtaaactagtgctcaaaagtgccattattatcgttcatttttaatcattgtttctacccatgctttgagaattagaaggggaaagaaagggaagaaacactgttgctgtttcctgttagctgcaagggtaactgggaagagtagaggataagtgtacagcagtgaccctgacatgctcagaagaggactgtaggcacagtaggtggtgtatagtcactagcatgactcagaaatatgcacatgttaagatagttatttttatgaagttttaagctttttcctcatttgataaagttaggttttttaatagtaatgttttaatatttggatttttaaaagaagtctgtgtgtgttcttttaataatagttaggttttatgatccagtgttaaaagtcatagaatcaggaagcagactaacctggactttatttctgtctcctcacttactctgtgtctcttccaacaagctactaaagtgcttctatactttaaatctttaagtggggattatattggtcattgttttatttgtgctttatggcttacgtgaatattatatgtgggtttagaacaatgtgtagcatctaatagtaactactgcaaaggtagcattgttattcatggctgttatttattggtagggcctaactcatgtaaattatgtatacattttaccattgaattacatctctagcctggtggctgggtttagtttagttttgttttgtttttttgagatgtagggtctcactatgtagctctaattgccctgagatgcttaagtttgaatattcttatactaaaatttctcaagattagataatatctcttacaaaaatagtttttatcaaatgttcaaatatagaaatcctgctaaataccatgaaagcttgctggtactatgatttttcagttttttctttctgttagcttaattttaagtacatctatgaaagaaattcctaaaatattatgactcccttcctcgcacaccaagctttcttaatgctgggaccatattttactgttcatctttaaatcacccaaacctaaagtttcactggcagctctatgctgcagggaaggttagtacgtttcacacacttttttttttttttaaaaagatgtatttatttatttttatgtgagtccactgtagctgtcttcacacacaccagaagagggcatcagatctcattacagatagttgtgtgggaattgaattcaggaccttcagaagggcagtcagtgctcttaactgctgagccatctctccagcccccttgcacatacttttaggtagatgatcaaatagaaatcttttggatcttaatagatgtatgaccttggggttagttatctaatctactttgtatttctttgaagaacatgtgaagttttgtttttggttttgtttaaaataatcagattatttttaaaaaatctggataactacctaaacacttggttggtttatacagttacctcagtatgttgcagcatttccaagtattttggataagaataaggaatataggtatttttgccatatttactttgttgtattctttagcatatgggagagactcctgcagacctgtgtattctttcttctcttacataatgtcatttttgtgcctcttgttcagtttctggtcagttttgtccttcacttcatatatatatgctgggcatacaggaaatgatacttgtttgctttacccctatatagagatggtgttctgttcaaatcatttccattttgcctttatgtttttaattgaagaatacacttaattgcatgtacagccatctaacagaaaagtggccatgttcagattagttaggtcatggaatttctaaaaaataatcaaactgtacactcatgtgtttattttacatagtagtatattataaaaggtactattgtagagatctcttcatgttggatctttgagatttagattactctttttaactggaataaatgaacgatagaccagtttgtatattaattataggtgggttttcaattttcatgtttcagataatatcattgtataagtttgtggtaattggacctagggtctcatgaatgctaaatactgattatacattctaaaactctttgtttaaactttttgtaaagaagagagtgcctctaggtggtggcattctctgcttatcttcaacagtgccaaatgacatccgcatcctccagatggccacatatttacccactccccagcagtgtggggtgttctcactgctttgtactcatactatttatgctcattttatcgatataaaatagcattccttgatatttcaatttgtattatctggtaactaatgtacttgatcctcttgccacatgatgcagaccacatgaatttcttcatgagtatttttccatttttaaattttagaatgtatccatatctattgcatatttttatgatgatcagttttgtgtttttcttgacttatttgcagttgtttttaattctcaaactcatgaaggttcttctcctttgtgactaatgttaactaggactttagctattttaggttgaataatgcagtcttctcagaattttttttttaacctgttcttgcctgccagccatttctgttcctcactttactcaaacattcctatctcctgggagatgaaatgctgatgatactaagggaaaagaataaataagaaatgcagcaaaaaaacgaataaaaaagggacagttctataaaattgaaataaccatgtttaaaatacttgaaaatattctcaagagcctgtctttttttcttatttagaagtacattttaaactttgtgcaaccaaagaccgattgtttaatgttgtcattgctgcaggaatttatcattacatgatgagttgtgtatgtgaggtttccagcagagcctctgaatgcttaaagtggttctgtgcctttcttaagagcacaaaaataacaattaaaaaacgtcttcagccagtctctttgagtcatttaaaagtaaatctgtttatttacttcttatctatatgctgtgtgtgaaatctcacaccaaggtttctgaaattaaattgggttcttttgtcaattctaccttgatttaaaactcaagtttctttactaacttaataattccttacttttaaattttctattctagaaagtgcgcttcttgtgaaattgtacttatttaaagacttgtacaagtagactgtactttaagactatactagggataattatctgtcaaggtttttgtttttcttaagatttgttcttttaaatttttttaaaaaaaatttgtttgtatagctcttttgcctgagtgtaactctgtgttctttgtacatgactgtacatgcctagtgaccttaacgtcagaagaatctgagaaacttgagttgcaagcagttgtgaatttccataggggtgctgggaagcaaatctagatcttctgaaagagcaatcagtgcttttaaactctgagccatctctagcctccttaagatttatttttgtttttatgggagtgtggtatgtgtagtagtatatgcccaaagaggccagagatgttggatcccctgagactagaattagaagttgttgtaagtaacccctgatatgaagtgtgggttttctgccagagtagtctatgcttgtaactgttgagccatttatagtaattcaaatttcatctttcaacttaagatctttatagtaaaatagtatgtgctattagatatatttgaagcttttatttgtgaaacttgtttttggatgtgataagagagtgtggttttgatgtgtttttaaagttgctttaagaagtagtgtgtgtggctagagaaatgactcaaggttaaagttcactcttgcagagaaccgagatgggttcccagcgcccatctgtaactccagttctagaggatctgatgcctttccaggctgtgatgggcgccagtgtacatgtggtatacagaccatacatacgaccaaacaccccatacatagacaacaataagataatccttgtgaaaaacttacttatttttccccattactttcagcttcatttacctctgaattcgccgttgcctggaagtgaattgaccaaggaaccttttcgttgggatcagagactatttgctttagtgctgcggttgcctggcaccatgtcggtggaatcagaacagttgacaggtgtgcctttggatgattctgctatcacaccaatgtgtgaagtgacaggaggtaaggtttttgctaaaagtaactcaggcttaaaacagtttatctgaatgtgctaaaatgaacatctcacaatttgcatgtttatgtttgtcaaacaacattgacattcctgtagttttaaaattgcatgtgttaatgttgggatgcaatcttgataaatactgttggatttcatgaatgttaggtttttgtttttaacctacgtaacaaatgatggtatttgaagttgttagacgaactttcctgtctacaaaaaaatcattagtgattttgctggcatagtgacatacacctttagtcctaatactgaagagtcagaggtaatatgaagtaaaattgtcaaagatttttacagaaattagaaaaaaatgaattaataaattattttacaaaaaaattaccattaatctaaaattatctgaaaagaaaaagcaatttttttctatactttacaaactgagctatgtaatgttcctcctatgattattgtttaggtctaatctcatccgttgtaatgtttgataatttctaccaaagcattaaaaatctacaatgggtcattttaactgggagaacgaagtatgtataatattgcacactttcaagtcaagaggttggcttattctcagctatttagagacacatgcatgcatacattagatagaccacactctataacagacctagggtcatcactaacacctgggtggaacagtgaagaatcacaaactttttgagttgggacaaagttaaatttatttaatctagaaaaatctgtaagcaagttttcataaaatacctgtttgttttgagtaggatgtatgttggatgcttttactacgctttcatccccaaagtaccgtctggtgtgtattattgaccagagccctgtagctcctttctccaattcaggacaaatgaagcatgtgggaatcacccttggttcttctgtgcatcagagcatctcttaccatctccagatctgacagacgagacacactaaagtattaatggttctaactggtccttttccactgtacaatactcatgtctcattgaatgtctcactgaaaagctgatccataagaaacagaaacctgatctcaaggcttataaaatggctttccatatttgacaaataaaccatacgtattaaggcctggaagacacttaatcaatattaggtccctgcctgtctctatctaaatctatccgtcttccacatgtaagctcacagcagtgctttcacatgcatccatatgtccttttctccctgaccctttctctttccagagcttcttgtggataattctatttttcaggttcctgattcaagtgtcaccacctcagaagaaacttaccaaaatatactcactctcaaccttattactaccatctatatattaaaataaatggaaataattaaaaatctgtggtaactgccaggagaccagttgaataattattctctcctctgcacttgtacttatcatcttttattttgttcagcaagtctgagagtttgaggagttattgctagatgtgtgtatgtatgtctgttaaagattggcaaacagttggagatagtagtgccttataaaggtggatagatacttgatattttttcctttgtgatttgctcaaccagggtttctatggtccatttaccttacctatacttagaagaagaaaattgtatactcacctacgatgagattgttggttggaaataataatttttgtttattcttcgttaaaattgggaaataccgaccacttagtttctattaatattgtcattaaaaaaaaaaaaaaaaaactatagtagtccttatgggagtttgactttttacaactaattagttcattctttttatctcaggccggtcatactctgtatgttctccaagaatgcttaatcagtgtctggaatccttggtgcagaaagtacaaagtggggtggtaataaactttgaaaaggcaggaccagatcctccccctgctgaaggtattgtattgtcctcatagatattctgagtttgatttatgaattattgacccctatcccacccccattgtgtgttgtttatatgtgtgttggtccaagcatttgggaggtagatctctaacttgaggccagcaagaccggcaggactacatagagatcctagctcaaaataaaatttaaagattaacaaggccagttgtcatggttacacaattgctattggtatagaagaggaagttataggaatattatattcaaattgaacaaatttttactagctagtgaactgcagtttgtctaacaaagcagtcatgacactctccaacttaagaaacaggaaagcccataatctacaagcattaggctttttttattgttgagtaaaaaaaatggatgtgttttaattttgtttgcccccctaatgtattttttttcttaacctctttgcagcagaggggcagccagatatatcaagaccttttggatctcagccttggcatagctgtcacaagctcatatatgtcagaccaaatcctaaaactggggttcctataggccattggcctgttccagagtctttttggccagatcagaattctccaacactagtaagtaccggagtaaccatgaccagttactaataaccatttagatgattttgtttgatggagctccttgactttgagagaaggtcctgctctgcagttcaggctttgttgaactgtatagcacaagctggcttgaagcatgaagtgatattaagtccaattgttatttaaaggtgtggctcatttacagaaattagataaatacataatatgcttataataagccattattttatagaaattagataaatatataatatgcttatcataataagccattatttgcttctacatatggtcttatgaagcaacagaaaaaaagatatcttgtttcccttggaatttaatactaggttacctttttgttacttacatttggatactgaattgtaaatgtatgaagatttctttattttaattttaaatgtaatgtagcatgaatatttgtctttggggtacaaattgaaatttatatgaaggactagaatacttgtgataatttgtatttcagtaactattatttgggggtttctactccaccttaaatcatttagttcccaaataaaagacacaaaatccttatatttataataagctttaaagaaataaatatcagccctctatgctattttgtctacttccctgtctgtaaccctgagatatcactttccatgttcatgttgggctgctcctgctccaacaggctggccctcatgccatgtgcttatgatccacctactccatggcaatttcttccttcctcctcctctctcttgtctttgctcctaactgagacccccaagcctggggacattctgcccagcccaggttgtaggcatctttattaaccaattatggataccttggggagttgggggcaggggcacaagggttacgtgacaaaagctggtatgcaggaggctccgcctgtcttggagcaacaagcagcaccagaccaaccgcctacaagttggcctgcagtctttcaggccatagtcttagaaattcatgttcacttgtacaactttagaacaactttattagttaatagtattgcagcttggaagttgagcttgtggggatttttctcattttacccacatgaattgtttttatgaatattgatggttgttgagtgatcatggtacgttataagtattctttatagtagaatacaattaaacaaaatcatatctattcagacttgtttaatctgtttttttctgattaatgtttttgtagcgtctagggcatgacacttattattaatattactcttagaaggtaggtttttggggctggagaaatggctcagtggttaagagcactaaatgctcttccaaaggtcctgagttcaattcccagcaaccatgtggtggctcacttatctgtaatgagatccgatgcttttttctggtgtctggaaacagcgacagtgtattcacatataaaagtaaatcttaaaataaataagtaaataaatatttttaaaggtaggttctagttcagagattttgagcaagtaactattattcatgttaaaataagccacttgtacttttttttaaactatatgtttgactttcatgataagttttaatttgagagatgaacttcaagtctatggctactaataaggtctttctccacagtatagtagcacatagtatagtacatgaaagtaaaagttaaaagtttcattgtattactttgtttaatcttttttctttttctgattaaatgtatataatttttgatttgcgtttatgaacaagcttttcatttctttggtgatatttatttcttttttcctttttaaaattcttcccatatttttatgaagtatctttgttgattattcatgccattgtattgacattgataccaaaggtatctatggtattttatggaaagtgagaaaaaatatggaaataaaaaagaataaagtgtatttagagaatggaagatgtagctagactgctgttaagtaaacggaactagactactgttaaaaaccaaattgtttgcagttttaaatgcaaaatttagggaatgtgagttgttcctcttcccattcagagtgcatttgaagtcagttttaatgaatctccactttaggaaagtaacttagtgcacattagaaggatgtaagttggaagggcaggtaggctacctgcagggctagtaatatggttcatttaagagatactaaaatgtttttcctagaatatggatcagaatgatcataagaaatagtactggatataactttaaaatttattaattcaagtctatccaggggaatgacatttctacaaattctaattttcatataagtagctcctgaagttaaaaagtgattttcctattaactgtgagcctgttgaccatggctcttgtcttccaaaattgtttggagacttaaatagaaatacatttaagaattttctttacctaaatatatagaagattttcttcccagaaaaggaaaaaaggaaattttaagactggcctggaagatggtaaacaaactattaaaatattttacacacacacataccccacactccaaatatatttaaataaaatgcagctagtaagaatatacttaccatcttgaacattaccagtctattgccagattctcagacatacatattgcagagcacagttggctaactgtaatggaaggcagggtgcaggtaatgtcaggaaataggacttaactgcttggtgtacgttttgagtctatatattgggaaggggtactagaaaagtctccctgagtttagttcctagcaagtcactcgttttctaaaagtttttagttataaaagagaaaatactgaagtagtcagtaagatccaggggcaggaaagatgatgacgtattagtacaactgcacatgggtagcatagctggaacatagagtctttataggacatgagtgaggaatgccttagagaccaaagcagtgaggcttttatttgaaattaaaggtgtgaacccttcttgccttgtgattggcccaactttaactgcatacgtttaaatagggaactacatgaaatgacaataggattattggagtagagtaactagtaggaatactagttagaaagcagttgtgtgtagtcttaacttgagaaacagcaaagatctgagttaaaatggtaagaaagattagtttctgaaattggggattgatttcattaatattgtcagaaagaaagccgcaacagccagtactgagcatgtgtcccatcatgtgttctagtaagtgccttccagttgcactgtggtttcattaagtctttgatagttaagatggtgaggtctttagaagagaacttgaagactggagacagattagatacaatgtatgtgaaggctgaataagagtcagattatgtccagtaggcagctgtagacatgagagaaatgagatagttttgatccttaaagtgttgtgtttttatggctctagaacaggaatctttaaaataaagtgttaggtaccttaggaatataccagtggaataaccagccataggaatccattgggaaatagagaaaaggctaacttataaatacagtttatgtcttttattaggtatacattgattatttatatttttatacccacagtttgtaaatagtgtctgaatattgcctgtgcagaaattaataaaggactgtgattagcttggaagttactactctataagtaattgccacaaatgaggtttagtgggcttttgtacatctttcttagatatgaaaataaaaattccttttaattataaattagttgaatgcttttttttctaaaatttgcatctaattaatgatacatttgattttagatagattttcattttatggattttgatctttctctttttcttggtaatattccataaatgtttgttttttcagcttaatggtatttccaggaaaccaaacttactaaaaagactgaggcattaagctttgataagagaaaggtacttaaaatgtgttgataaaatgtgttctggtattttgtgtaaatagtaataagattttcccctctagccacctcgtacatctcatcctgtagtgaagttttcctgtacagactgtgagccaatggttattgacaaattgccttttgacaaatatgagttggaaccttcaccactgactcagtttattctagaaaggaaatctcctcaaacgtgttggcaggtaagctgaaaaactgtagtgaagaaaacatttaggcaatgtttctgacagagctaaactggggactagagagatgggtcagtcaataatgtgtttgctgtaagagcacacaaacctgataatacaaattttggatacctagcacctgtgtaaaaagccagctacaatagcctatctctgtgttgggaaggatataggaggaccttgggattcattggctagatagtctggctgaaatggtgaactctaggttcagaaagagactgtgtcaacagaacaaaacagagaacaattgaggaagatactcagtgtcaacttctgccttccacacacacctgcatgtacatgcatgtgcatatacacacaagcgaaactgaatctatgttttgcatatcattcattgcaggtttattgaatatgagttttaaccttccttttctacaggtgtatgtgagcaatagtgcaaagtataatgaacttggccatccctttggttacttgaaagctagtacagcactgacctgtgtcaacttatttgtgatgccttacaattacccagtcctccttcctctattaggtaagtcattcttgcatgtgctcttatggaaagctaagaaataaacctatcttagctctaaaaattgagaatgttaaacctactgtaaaattcttatattttacaaacagagatactactatatttaaattttaaaattaaatattctaactttgtacaagtaagtttccttactcagtggtactttctggggtagcctttctgtctaatgcataaaagatgctctattcataaaaaacctgaatacatgttctaagaatttacctaactcttcatttgaaaaacaattttgtgtgagtatgtacatgttaaagcaacagctcattctcagacattgttcttaagaagctattcactcagtggttgtccagttgtttaaatttatgtgagagcatgtgtttatgtgatcatgtgctcatatgtgccatggtgcatgttcggtggttaaagcgtcacttgtgagagtcgttcttgccttctactgtgtgggaatccggagaatgaacttaggctcaggttgtcaggcttgacaacaaatacctttctttgcctgcttagccatagctggccacaccataaatctcttactaggacctggggctttctgctagctggccataagccttggaggtctgttcacctcttctgctctgcgattacaggcatgtatcactatacctacattttttcgttgttaccagtaattcaactctagtcctcatgttcacaacagcaaacacttttctcaactgagctatgtccccaatcctggaaaatatttaaaacataagaaagcacagcgcctgtttttagggtcaagctggttgtcatttttgagcagtactgagaaacattccttttgcaacccatcaaattaaaaagttgtagtgaagatattagtagttaatataggaactattgtatgttgtacatacttgatttttctagtaggacataagatttttccttgtgtattttctgattctacttaattaattattttttagaccataattgacagccttttacctttaaaattgagttacaaacaaaaactgctagagctaagtttactactcttaattttgctaataaggttttctggtgttaagtaacgaagtagacttgaaagaggaactttaactagaggtagaacaatgagtgatgctactctgttgttgactgttctagatgacttgttcaaagtgcacaaagcaaaaccaactctgaaatggagacagtcatttgaaagttatttgaagacaatgcctccctactatcttggggtaaggagaatattgttaaaatagatcttgaaccttttgatcatctctataaataacatgaaaattgaatgtacaggtaacatgaatgtaattatagattttagtggtttgtaggataatagttgtgagaatatatgaatattgtgtcgccaagcccaggtactgtcataagcatgatgtgtgtattaatggtgtttaatacttaaggtctctctgtgaggtaaaaatgatgttttctgcctcaaagataaagtcaggaaatgaaagtaagtggtcatttctagttctagtttctacttttgatgcaagaatttactatctctgtctagaactaatctttataagtgcttcctatatcattagaagattaatagcttgattttatggttgtaaaagttatagtttctttgaaagtcgtgttagagtaagaaggaaggagctcgttgactccgttctctttagcaacctctaagacttagccagagcttcatgagtattacataagtgtgagctctgggttttgattctgggattcagcagagcttatgcactttccatgccagtttttttctgtctttgtgtctgttggagatattatattgtataaagtgattctgagttagtccatccttactcctgaagatttttttactgttatatatgtgttttaaactttttactctgtttgttctcctgtgttgtccctgcactctcattcatagcttgtttgctatgttattggggaggggaccaggggattttaaggttcatgagtttgtctgagctttcccagttggctaaggtccctgagtttctgagccttgtaaatttcatgagcaatttcacgagcttctaagactaaaaaaaaaatcttatttatatacataaaaaactcagttaatgataataatagtgtggatcaaaatctattgaatgcttactatatgccaaatgctttttataaatgcattccatgtttgtttgtttgttggttttgggggggttgttttgttttgttttgtttgttttttccagacagggtttctctgtgtagccctggctgtcctggaactcactctgtaaaccaggctggcctggaactcagaaatctgcctgcctctgcccccgagtgctgggattaaaggcatttgccaccactgcctggcttgcgttccatgcattaactcatgtaattccataacaacttgttaaagatagatgtcctttcctccttctaaaagtaagaggtaactcaggacaagttgtatcactagctcagattgtgtgtccagcccccttacccaatgttacactcagactggccccacagtgtgtcttctgtcttccaaatgagtacctccccatggtattgagcatttctggacttcattcttaatgccccgattattactcttctaatttatattaactaccttaagttgcttttcatggcactgattaaacattttactaacatactaacatataaataatattgttgttttgtgttccttttaaggcaaagaatgcaagttggggtgaaaaaacttttaaaagttactatatagaacatttttctttttttttttctttgaacatttttcaacaacttgatattgaatgttgtttctttttctatagcccctgaagaaagctgttagaatgatgggtgcacctaatctgatagcagacagtatggagtatggactcagttacagtgtcatttcatacctcaaaaaattgagtcaacaggtaatgtcagaaactggaagtgaacatttaaggatttgactgctagctaacatttttaatagtctaaaagctatctagttcttgatgactgtctttattactgaggtactcgggtcaaaccagggcttctcatgtggtaggcagtttgccactgaggtaatatcactagctaaccctttcattttgaggcaagttaacttgcatcagacttgaatttggcaaacctcctgcctcagtcttgagtactgcgattacaagtgtgctgctatcctatctaacagactgtaaacaagatcttgttgattcctcattgtataatttctcatttatgcatatggactagcttccggtatatgattattgttgtttccttagggggaaattgccattctgttttgctttgtgttttaaaacctgtatgcattttctttcaaacctcgacgcttctttggaactgtttataaaaccatggagtttttatcattttggctataagttctattaagatacggtgaatatcaagcagttggcagtttacttccatccaaattgtgaatgtctttttaagttttctagtactttagacatttctctgcaattgtgtatgtagttctgagctaatcgtgtctttaagcggtttgttgtctcatttcctgttgcttctgaattgggaatgttttcttttatgagacatacttcatagtttgtgtgtgacaggtattaattaataaaataacttgaaggagtgtttgtcctgctttaaaagttttgagttgtaattattttaattgagaaactattgttattaaggtatgtttggtttacctaaaactaatgtaaactctgattacttgattttaaattcaatacataatttatggaagagtatggtcactagcatctgatttataaattgtagattgtattaagacaatttttgtttctttttactttaggccaaaattgaatctgatagagtcatcggatccgtaggcaaaaaagtagtacaggaaactggaattaaagtccgaagccggtcacatgggttgtcaatggcgcataggaaaggttttcaagtgctgcagggtatttcggaggatgtcccccacaggttgctagaccttaatatgaaggagtacactgggttccaggttgctttactaaataaggtaacagtcagtttaacattgctttagttgtgttgtagtctgtcatagagcaagttatagttcatattaactaacagtttgtcgaggcttcaaaaggctcacttctatatggctgtagaatgatacttaatatattaccactgaacctttgaattaaaacagaaattgtatatagtatgtgaatgaatgagttgattgatagtgaaaacaacggcttaaagattccatcaagttacagagctgatattagaattcacttacacttaagaccttagcatgctttataactcattattaaaattatttttttcagcaacctttctgtagacaatagaatagccgagctgatatatgggaatacaaagagtctggaatagctgaagcagttttggaaaaggaataaagtttggacaattgcagatgcgtaatttagaactgaaaaactgctgtgattatggcaaagtgattgtgtggttaaatacagaggcgaggtagaatggaatagggcaggtcacacacagtcatttaacatgccatgggaatcaaagtgggaaaagcctcttaaaagtagctacagcagtgggtatccctatacaacatagttacctcatatttgatgtaatcataatcataagaattaaaccttaagcatacagaagaaaaaaagaaaacatcttcatagtgtttaaagctaatgaagatttttgtagtataacacaaatccaaaaagaacacaaacccaaaaagttggtaaattgaacctttttaaaattaaatatcctctcttcagtgaactggtataacttgagatgtagttgaatggtcgaatgattgcctaacatctgagagcccctggtttcactctcaatactatatatattttaaaaaagaagaaaagaaaaccaaagtaggcaaggtacaggtcagagaagcacagaacttgtgataaaagactggaatcaagatattgacatccagaccatgaaagtgctctaagctatgtgtgacgatgtcagccaactgtaagctcacatgcttgctcttcaggcccacatgctcagagagcagagtgctgatcaaactcttctagaggttaaagaagggcttttgttaactgatttgcttcccttacccagagcatactaaaagatcttaaaacttagcggttgctttattttgttgagcttaccagaaaacgtcttatcttttggccttaaaatgttgtagttaatattgtatcgttgtgtgtttgttttcttttgctctttcaaagctgcctagttagcttagttattttaaatttcatttttgagcctatgctgcaggctaaagagattttaaattctttttagaaatattttatccttgactgtgtttgtgtaggatttgaagcctcagacctttagaaacgcttatgatataccaagacggaaccttctggatcatttaacaagaatgagatcgaaccttttaaagagcacccgcaaatttcttaaaggccaggatgaaggttagagtatgattttaaatattatttctgtttttaaaacaacctttctttataattggtaaggagatgataatatacattgtacaaacttgtagtattctcattaattcaagtaggtgatgtaaagcactcagatatacattcatataattaaaaataaaaatgtttaaaagggtgattcatcccttattttctacacttctccttcatgtcattgttaaccacaactcctcttaccagtttattcacacttcttcaggcacctggactcctacggtcattttattgggctgtgttagcatctgatagtttgactctgggtgaccatttcatggcatattctgctacttccttgtttctatggcatctgttgtaattcacaccatgagctcttgctatgactaaagccttctcatcattacacgtctttattcatgtgctagtttcactctactattttctacaaattctactttattttgcctacaagataaaattagtactttaaatttacttttgaagaattaaaagctgttacatttatacatgctctatactaacttccagtgggtagtaaaatggggttggtattcatatatgggatagctagagtaattattagtgatgataacttttgtttgatatattctctctgaaaagatcaagtgcacagtgtacctatagcacaaatggggaattaccaggaatacctcaagcaagtaccttctccattgagagaacttgatcctgatcagcctcgaaggttgcatacatttggcaatccctttaaactggataaaaaggtaactctgaaatgttctatgatataatttgttggatagctgtggtcaatttagcttaagttatttttggggaggaatatctcattaaagtattaatattaagagtttaatttatcaattaaagaattgaggttagccaggaggtggtggcgcacccctttaatcccagcacttgggaggcagaggcaggtggatttctgagtttgaggccagcctggtctacaaagtgagttccagcacagccaggactatacagagaaaccctgtctcgaaaaacaaaacaaaacaaaaaaacaaaaaacaaaaaaagaattgaggttagttgtactacttaaaagttgggtagaggggcttgggagatggcttagtgtgggttaagtgcttgtcatgcaagcatgagaaacagttcaaatccccagagcctatatagaaagccacacacagtagcactcatttttaattcctgcactcctctggcaagttgggagttagacaattgactcccagaagctaatgagccagctactctggcatgcacagtggtgaagaagagaccttgtcttagacaaggtagaaggtgaagacttgtacctgagcttgtcctcttatttccacatgtacagtatggcatgcccatattcacactgacaaaaaatggacccctccacccccaacacacatagacaaaccacatggacattcaagaaaatgtcattttcttttttagtatagagtaggaaggtagataccagagggtatgagaaggatgaagaagggaaagataagattaaagggttactaagtcccagcttcaggaataaattttcattagctcctgacaacattgttatcctagttaataataaaatgtgttatatatttcaagttgctaaaagaacatatttccaacatccttaccccatcaaagttggtatgtattagccatgttaattacattaaatcttttttttttaaagattttcattttttaaaatttacatgtgtatgtgagcctatgaggtattcccacacatgtagaggagctttggtgctagaggagtgttctgggtcacctgcaactgcatttataaatgtttgtaaactgtcatgtgggtgctggaaacagaatctggattaagagcagtaagtgctcttagcttctaagcccatagttaaatctttttttttttttttaatgtattgtgtgtatatgtgtgcatgcgcacttatgccatggcacacattcggaaaatcagagggcaaatttttgtggagtcagttttctggttctctacctttcttgtaatggtaggctttgaactcaggtcaaccaaagcacctgctattcttccttgcccatccttgtttaacccttctcctgtgtgtgcatagatcaagctgtcaaaattgcataccataaatgtgttgttattcatcaattaaaatatatggtgcccattaaaatgtaaaacttacttataaacccaacatttcctatctgttaatagggtatgatgatagatgaagcagatgaatttgtggctggacctcagaataaacacaagcggcctggagagccaagcatgcaagggatcccaaaaagacgccggtgtgcctctccactcttgagaggccgaaggcagagccctgctgtgaacagtcacatcggagggaaaggaccacctgcacccatgacgcaagcacagccaggtcttattaaaccccttcctctgcataaaggtagcactttggggctttcaaatactacttgctattttggggttcctaagggaagagatttttataatagaaacaaaaagattgttcagcagagtccagtgagtatttattgtgaatttgtatgaagtagtttggatgtctttttgatgaacattctataaattcatactttgccatgttctaaaatgacattagcaaatcttaaagtatttcaaaaatggttgtggaaggaatattgtcactgccagctaaaataaacatttttctgttcagtaaaacctaacagctaaacccaactattaaatgtttattatactgtgctacagatgtgagcaaggctgtagttacttctgacctcttagtaggcaatgaaagaaaatcatctaatcaattacaagtgtgttaaatgttagagtgtattctagaaatatttgacatgaagaatgtctatggatgagtgggaattaaagctttccctgtgctaaagagtctaaagagagtatgcatagaaatacatagagagaaagatattaagacctgaaagaattctattatggcattggtattgggcatatttggtaagaagagagtggaaagacagtcaaagttcaattcaggggtggccttcgacccttttataaaagattttgtattttattccaagatcagtgagaaaccattgaatgcttcaaaagaggtggcaacttggttagcattttatgtatggggtatcattttatatatgggaatataggaaacttaataagtcaatgtttttgttaattttacatagtgacctcatttgcttatataacatcttaaacatacggatgttaaacatatggagagaaatccaatgttatgtactatgtgatagaattatacagtactcttctcttaaatatatttgactcttctcccctgttctgtattgaatatcagtgtgatcaagcctctagatctagtaattgcatgggaaataaaagagacagaaaaagaggttaaataacaaaagtggggtacaatcagaaaattaagatcatagggaactctaggacatacacccaaaaacgaatctgttgtgttgtttttgttattgaaaaatataatgaaaagagagatgcagaaaggctttatagagtcaaagggccagttacgatgcatggacctcacttggatccagaataaaataagattaaaccttcaaaaacaaaatgtataaaataactgaagggtgagaatgctgactgggtagttgatgttatactgtaactgttgtacatccatagggcctaattagtaaatgcagatgatttgacctgactgtgccttgagaaacagtcggcaagttaggaaaagcagtaagtgtgagtttatcttaatagtgtgttgatggtttgaaaagctttagaaacagaccatgcaagttagaaacatcttttggtctttgtctgtcttactatcaccaatacatttttgtgaagtaaaggacagaaagctttttttaaaaaaaaattgagaaagaaagaaggatgaaagtacacttgtatgaaaacccagttttgagttaagctgtaaagggcagggaggctagtgagtaatcagtccatcaagatgaagatggtggttttgctcgagaatgtttaaatgctggcatcatggacctagtatacagaaaggttaaaataaagatgagagagacaattatctccaccaagaaggcaagaggaaatggcccagcttgctaatgaaggaatgctgtttctgttgaacaaaatgagtgtgggtacaaattcataagaaataagtgagtagaagagtcctcacccaggactttgcttctccaataaatagaaagtaggtatactgctgagatagagaagatgattggaaaagttagaactcggaaggaagagaaggaaggatatggagtatctgggaaagggaggaggcatggagtaggcttgctaagaagtggacgatccaaacctcggtggtaattgggaccactctggtagatctggctcctatttttccagctattgtcatcactccaattaaatggctgcagctaacagacagtgtaaaccggccattaagtctggtgtttacttgatagataccatagtgtgggatgttagaactagatcattggaacattgttgaaagtgacctagcatgggcttaagcctcataaagaagaaggtggaggagttgctggagtgaaagttggtagacattggtgctacagaacttcataaatttggagcatgcaaggggagtgcttggggtccttgttaaactgcttgttatcatgcaagtcaggactgggccacaaaggaagcatttcagaggctttcctgaggcttccttgtaagaacctcctagaatgttaggagggacttacgaatgtacagtgaacgaggtgccagagcatgtgcactgaactcagtatgaagagaattgttcaaaagtgcaggagtttttttgccttttttttttttaatggttttagagttttattgtagaaaggcagagagaaagagagaaggtagaaagagagaagccagtcatgaccacgtggagagagggggaaaaggagagctagagatgagagtaagaaagttgagagcgtaagagcttttttttggtttttcgagacagggtttctctgtgtagccctggctgtcccgggactcactctgtagaccaggctggcctcaaactcggaaatctgcctgcctctgcctcccaagcgctggagttaaaggcgtgtgccaccactgcctggctgcttttttctttataaagaattaaatacaagagattttaaaattacatttaagaggtgaaagagtcagtgactatctcacttttacactcatgagaaagcaatttctactccacatttgagaaggagagaagtggcttgtttgttttattttttaaataggagagtgtggttttcattaaagcagaaattaccgtgattttcagccttaaccttagacaaaggctgagaaacagttgtggagaataatcagtgaagaagtgttttcaaaccatggggtataattcagaaagtatgagagagggagatggaaggagtagaaaccaggtctttacattgagaggtagaatagaagggtttagctggtgccctggaggctggtgaataatcaaacttaggggtcatgtctaagaatcttatatttattggcaagctagtaaacttttgggtctgctggtctaatgagctgaagtgggcaccagattactttgcatggctaggaactgaaaggatagatagaaaacagtgtgctctgaaatgtaatgtgccttatttggtgttccttgcagaatcttgagcaataaacaccactcagtgtttacttttctctttaaagaataacaggtttataaagataagtaggcttaagatgaggtaggtaggactcttaagccaaaaatggcaattttagtggtgtataaactgaaaactggtttagttactttgctaaaataaggtagaaaacaggctacagttgtttctattttaaatatgtcataagtttaaattttagttatttgtagtaattgtgttactttagcatttttattctgtactttgataccagatctcacttttcgttccgtttctttggtttcatttcagaagccactaatgattcaatagtagatgatgtggttgaaaatcatgttgctgaccaactttcatcagacatgacaccaaatgctatggatactgaatttttaacatctccccctaatcttttggaaccatcaaccaatcatacagaggcccttggtcatgaacatttaggaaacaatgacctcactgttggtgggtttttagaaaatcatgaggagccaagaaataaagaacaaagtgccgaagagaatataccagcatcttcactcaacaaaggaaagaaattgatgcattgtagaagccatgaagaggtcaacactgaactaaaagcacaaataatgaaagagatcagaaagccaggaagaagtatgtataattagagacaaaacttactaatttctttgtcttcaattagggaaaaccaagtcaaatcagtaaaagcatatgtattatgctagattactcatgaagtaatatctgaattctttaaggtttaatttcagattcagctggaaaacactaaataatcttggtactcaaggtgttctagtatgggtggtagatagcagaaagtctttatctagagatgtagtacatgtacttgccatgacaggggcacagaatcttgactgttctaactaggaattgaaattttacaacagctaacccaaacagatagggtggataatactacatgacttggtgttcggttaacagtgtatctaagaggtagagcacctgtatagcccaaattcaattctcaacactgtcttgtgtgtttgcaaagttcctctctactgactgtcactatgaatgaattatgatagtgaccttcatcatgtgcttaggctccaaaccaaagtcgtaaggccatcacatgaatgcaagagaactctcgtggtacaagaattgtgcataatattggcatccattcagaacatagctgactctgctgtggtggtgtaataagaaagtggaagggtcttgagcacacacacatacaaagtgcttagaaggttttatttttggtgatacatactttcatgcacatacatgttaacagtggtctgtaaaagctttgaagagtggtaatatttttatgtaaaatattttttgtctgagtatagaggcagttaattgattttccttctctctctttttttaagaatatgaaagaatcttcaccttactgaagcatgtgcaaggcagtttacaaacaaggctaatattcttacaaaatgtcattaaggaagcatccaggtaaagaaacttgtgtgtttctaaacaataatgaaatagtttttggtttgcatatatacttgaattgcattagttaggcagttgggtttatgtatgtgcatggatttgattaattgaaatgtgaattagcttaaaagaggaaaaaatggaaaaaagttgcacacgtcccttatcactcaaaatatcaatgtagaaaggtaaaagaagttaaagatgtacaacaccaccaaaaagcaatggagaaattaatcaagaattttagaagaatataataatttaccagggaaaagtccataatttctcaaggatttatgtgcctacttcagcttgggcacacttctacttggaatgctgaagataaggctatgtgttttcatataagttgaaatacttaagttattctacttttaatgaaaagtctgttctgtcttttgttcagttcaaagcatgccttgaatttttagtgttgttcatttttgagatagcatcttcccacatagccaagctagcctccatcttaggtttcttctgccttagtcttccaaatgctggaattataggtatgtgcccacatgctaatgcatcttgaatctagttgtgttccttgcacctgcctttctgtaagaaagtagtaggaatagaatgtccagaaatattataaagagcataaatgatatttatgattttatatatgattttagtctacctatatttgttactgataaatattttgtgctatatatcctgctatagataccttatgatacttgatgtcctggtcttcaagttatagtagaacactgattgtttaaatgctactatcaattttttattttcattttgtagggacttcaattttcaaaaaggactagatgataccacagtaactgttttgcagttcaactttactataatgtttagaatccttgtgtgtattagtatcttttttatttttggtggtaggaagaataaccattcttcccttgttcctaagacaagatgagttcttctaagaaaaactgtaattcagttctggtttgaatagtaacttagacatttttcattagatttgtgcaagtttttgtgtttggcacacatgtggcaatcaggacaacttcagaagtcagtctctacttccatatgagttaagaggacatcagagttggtcaaagttggcttttatagcctcattatcttctgagttattttgttagtcctcaacagattttttttttttttttaaatgttccttttttgagactataataccatggcatcatttcccttttcccttttctcttcagaacccctcatatatcccacccttgctttctttcaaatccatagcctactaactattgttacatacatacatacatacatacatacatacatacatacattgtgtgtgtttgtttatattacaaaactatcatctggttggtctgtataatgttacttgaaaacataaacatatttacaacaccaccaaaaagcaatggagaaattaatcaagaattttaaaagaatataataatttaccacggaaaacgtccataatttctcaaggatttatgtgcctatttaatgttacctgaaaacataatattatgttttcagggcagacctgaaactggaagaagactctttgtcctgctctcagcattccttggttatccattagttcgttgttggagctgaaacctcctgagtcttcatccactctagcctgtgtctgttagtactgtccttggtcagctcatgtttaggtagttgccaatagactttacgtattggtttttgtttttttttaattatcttttttatttacaaatcagacgttgccacgcctccagtctcctaccacagttcttcttttagcctccccctacccccttcttttctttttcattttactttaaaacaaacgactctttcccaaagccagtttttctctttgaaacatgctagtatatactgttcattagtaggtaattaagaatgctcttatttttcttacacaggtttaagaaacgaatgctaatagaacaactggagaacttcttggatgaaattcatcgaagagccaatcaaatcaaccatattaatagcaattaaaagaaaatagaatgaggccacttatttcattgtcttctccaaatacaaagtaaatacaagactgttgtaatcttgtattcattctttgacatgcattgttggctatttgagatactaaaaacattctacagttcctttccatcattttacagtgcccttttcattttagcttacttttgtaaagtgaaaagtatcacaaattttttttctttcttcccttttttctttttctttctttcttttttttaaccaactaaaactattcttcaaatcctctgcttgtcattggctcttgcgtgtcagtttccctcaggttatattttcttaaaccaacctttaaaattgtcagctctgttaaggttgaactttgccaaaaaaagaaaaaaaaagaaaaaaaattaaaaacaagttactttgtaatttttggggaaaaaaagcacatacattaaaaactaggtaatgttttgtatatacagttattttggatatattattgtaagttgtacaaatgtattttgaagaatatttaagaaaagcacttttgttattccatcaataaatgctctattttactcttgtgtggtttaggaaataatcacatttaaagtaactacttaaaaacattctaaaacaatggaattttaaaggccttgctttttagcattaaaaaatacacaacttaatatttgttaaactaatgtaattatatgttacatagcctgcattgtctttttaactattatatgttcttagtttttgttggccatgccaatatactccactcttgcctggataatggtaatacttactaggtctgtggcagatagacagatgggcagtttttttaaaaacagttttaaaagtagatgagttggggcattattggcttcttaacacctttcaacctttcttacaggatttagatggcactctagctgttagttaaggtgtgatagctttagggtatatcatatttggagaaggctagtatgccgacatttggtcccctccctcccccgatgcttaggtgagtttataatatgataattcagagtggatctcttggttctgctccctgattctcagaatctaactggagaggaaacagacttagacggctgtactcatttctttcccccttatttgcacaggatgaggatatctggcactccattctccatcctcacagggctgcacatctttactaaggatgtgaccctgtgtcctgactcatgcacatattcatagatcactgccgtgccttttagtggtttggagggaaccagtagaaaaggttagagtttttagatttggaataaccaaggtgaaaaaaaataccctttaaattatttttttaattgaattatttttagattaataatatttggaaatcacatactcttaaaagaaattgtaaatatttatgaaggaaagcatacatagagaaaacattcttgaggtctgctattttagtcaaggggatttgaaactcttccgatactgaagacaaaccctgtaaagaaaaagaaacatttcatgtgacttgtggtattttcataaaacaattcattaaacatttctaacgtcttcacaatttctggaagtaaatgaagatataatttagagatggaattattaaaataattgcctgtaatcacactgctaaatttataccaaactatacaaaatccagattaactttgtggttgtgaattatgtgtattaagagtgagatcagtgggaacactggagtcatttagataggaattatatttagtcagcacatgggggctgtccttggaagggtctttatgtcataagcatggtggaataattctcagatcttcttcctttactacaatttccaaaatgaacccccaaggagtgtaaaataacaggatcttctgtgtctgtgttctacccttctccctttccccactcctcctctctgttcctttctctgtctggcataatactgtttacatttctaatactaaaacttagtctgaaaatttgcagcctatcaaaaactaaagcttaagattccatccacctcaggcttttgcctttcaaagatggtgggcaagttagtcaagctagtgaagtttctacagaatccttgttagccaaggcaagggaggatatatttggggatgggtattttattctttgagatcgtggaatgatgttgtgttggacaagtgctctccaaagggttaatgttagagttctaattttccttaatgttcccctatgtgtcctatttgttagttgattcattcatcagtataagacttgtaagcttttaacagtgaaggccgagactttttttaggttatttttattttaagagttttgtctacatgtatgtaagtgcactacatgcgggcctagtgcttgtagaagcccaaagagaagagagtgtgagattccctggaactggagctgcagactcctaggagtttccatgtgggtgctgggaagcaaatgctcttaaccatggccatcttctagccccagctgaagggtctaagggatttaaaaatcccttaagtgatatcagaaaattatccactttgccttgggtaatgtgaacaaccatcatccagaaaactaaaaagctacaaggacggagactggtgagttagggaactggtttttttattagacttgtattttcattttgatacttgagcggtaaaaattatattgttgaaagtgtggtgtgtcttttctagtctaacagctttacatggtttttaatacagttgaattttaaggatctgttatttgtcttctaactgtcctctttactggatatgagctttaggcagtggcccttctgttcaaggttagtcctccctctttgagagtttaatttaaaacttgctttttgttgttacaattattatttttattattttttacataatctctgctgtctgttcttagtgaccagtgccgttttgtgtagtcacagtcactgtggggtcgggataatcatggtgaagttatgttatgaactccttcttcccaaataatctccaagtagataattttccaggaaatgattacctacatccttttgtcaagaaatgttcttttgatttctagcacaaatatgacagtatacaaatgattctcagataaaatgatgttgacagtattttcttttaacagtctgtgttaaactatgctaattttcattctaactttcgatattctttccacaaataaaagtgatgcctgatgtttagtt

SEQ ID NO: 183 - DNA, 6081 bp, Mus musculus
gggagtttcctctcaactatcgggggagaaactccccatagctggtgttttcctcccgggggccgcgttccccgccccgcgtatcggcggttgccgccgccgccgccggtgcttccacctctgccatctcttcaccacctcgggccccggtgtccccggccagcactatgcccatcttactgttcctgatagacacgtctgcctctatgaaccagcgcagccatctgggcaccacctacctggacacggccaaaggcgcggtagagaccttcatgaagctccgtgcccgggaccctgccagcagaggagacaggtatatgctggtcactttcgaagagccgccctatgctatcaaggctggatggaaagaaaaccatgcaacgtttatgaatgaactgaaaaaccttcaggcagaaggacttacgactcttggccaatccctaaggacagcttttgatttgttaaatttaaatagattagtaactggcatagacaactatgggcagggaagaaacccctttttcttggagccagcaataataattacaatcactgatgggagcaagttgactactactagtggtgtccaggatgagcttcatttacctctgaattcgccgttgcctggaagtgaattgaccaaggaaccttttcgttgggatcagagactatttgctttagtgctgcggttgcctggcaccatgtcggtggaatcagaacagttgacaggtgtgcctttggatgattctgctatcacaccaatgtgtgaagtgacaggaggccggtcatactctgtatgttctccaagaatgcttaatcagtgtctggaatccttggtgcagaaagtacaaagtggggtggtaataaactttgaaaaggcaggaccagatcctccccctgctgaagcagaggggcagccagatatatcaagaccttttggatctcagccttggcatagctgtcacaagctcatatatgtcagaccaaatcctaaaactggggttcctataggccattggcctgttccagagtctttttggccagatcagaattctccaacactaccacctcgtacatctcatcctgtagtgaagttttcctgtacagactgtgagccaatggttattgacaaattgccttttgacaaatatgagttggaaccttcaccactgactcagtttattctagaaaggaaatctcctcaaacgtgttggcaggtgtatgtgagcaatagtgcaaagtataatgaacttggccatccctttggttacttgaaagctagtacagcactgacctgtgtcaacttatttgtgatgccttacaattacccagtcctccttcctctattagatgacttgttcaaagtgcacaaagcaaaaccaactctgaaatggagacagtcatttgaaagttatttgaagacaatgcctccctactatcttgggcccctgaagaaagctgttagaatgatgggtgcacctaatctgatagcagacagtatggagtatggactcagttacagtgtcatttcatacctcaaaaaattgagtcaacaggccaaaattgaatctgatagagtcatcggatccgtaggcaaaaaagtagtacaggaaactggaattaaagtccgaagccggtcacatgggttgtcaatggcgcataggaaaggttttcaagtgctgcagggtatttcggaggatgtcccccacaggttgctagaccttaatatgaaggagtacactgggttccaggttgctttactaaataaggatttgaagcctcagacctttagaaacgcttatgatataccaagacggaaccttctggatcatttaacaagaatgagatcgaaccttttaaagagcacccgcaaatttcttaaaggccaggatgaagatcaagtgcacagtgtacctatagcacaaatggggaattaccaggaatacctcaagcaagtaccttctccattgagagaacttgatcctgatcagcctcgaaggttgcatacatttggcaatccctttaaactggataaaaagggtatgatgatagatgaagcagatgaatttgtggctggacctcagaataaacacaagcggcctggagagccaagcatgcaagggatcccaaaaagacgccggtgtgcctctccactcttgagaggccgaaggcagagccctgctgtgaacagtcacatcggagggaaaggaccacctgcacccatgacgcaagcacagccaggtcttattaaaccccttcctctgcataaagaagccactaatgattcaatagtagatgatgtggttgaaaatcatgttgctgaccaactttcatcagacatgacaccaaatgctatggatactgaatttttaacatctccccctaatcttttggaaccatcaaccaatcatacagaggcccttggtcatgaacatttaggaaacaatgacctcactgttggtgggtttttagaaaatcatgaggagccaagaaataaagaacaaagtgccgaagagaatataccagcatcttcactcaacaaaggaaagaaattgatgcattgtagaagccatgaagaggtcaacactgaactaaaagcacaaataatgaaagagatcagaaagccaggaagaaaatatgaaagaatcttcaccttactgaagcatgtgcaaggcagtttacaaacaaggctaatattcttacaaaatgtcattaaggaagcatccaggtttaagaaacgaatgctaatagaacaactggagaacttcttggatgaaattcatcgaagagccaatcaaatcaaccatattaatagcaattaaaagaaaatagaatgaggccacttatttcattgtcttctccaaatacaaagtaaatacaagactgttgtaatcttgtattcattctttgacatgcattgttggctatttgagatactaaaaacattctacagttcctttccatcattttacagtgcccttttcattttagcttacttttgtaaagtgaaaagtatcacaaattttttttctttcttcccttttttctttttctttctttcttttttttaaccaactaaaactattcttcaaatcctctgcttgtcattggctcttgcgtgtcagtttccctcaggttatattttcttaaaccaacctttaaaattgtcagctctgttaaggttgaactttgccaaaaaaagaaaaaaaaagaaaaaaaattaaaaacaagttactttgtaatttttggggaaaaaaagcacatacattaaaaactaggtaatgttttgtatatacagttattttggatatattattgtaagttgtacaaatgtattttgaagaatatttaagaaaagcacttttgttattccatcaataaatgctctattttactcttgtgtggtttaggaaataatcacatttaaagtaactacttaaaaacattctaaaacaatggaattttaaaggccttgctttttagcattaaaaaatacacaacttaatatttgttaaactaatgtaattatatgttacatagcctgcattgtctttttaactattatatgttcttagtttttgttggccatgccaatatactccactcttgcctggataatggtaatacttactaggtctgtggcagatagacagatgggcagtttttttaaaaacagttttaaaagtagatgagttggggcattattggcttcttaacacctttcaacctttcttacaggatttagatggcactctagctgttagttaaggtgtgatagctttagggtatatcatatttggagaaggctagtatgccgacatttggtcccctccctcccccgatgcttaggtgagtttataatatgataattcagagtggatctcttggttctgctccctgattctcagaatctaactggagaggaaacagacttagacggctgtactcatttctttcccccttatttgcacaggatgaggatatctggcactccattctccatcctcacagggctgcacatctttactaaggatgtgaccctgtgtcctgactcatgcacatattcatagatcactgccgtgccttttagtggtttggagggaaccagtagaaaaggttagagtttttagatttggaataaccaaggtgaaaaaaaataccctttaaattatttttttaattgaattatttttagattaataatatttggaaatcacatactcttaaaagaaattgtaaatatttatgaaggaaagcatacatagagaaaacattcttgaggtctgctattttagtcaaggggatttgaaactcttccgatactgaagacaaaccctgtaaagaaaaagaaacatttcatgtgacttgtggtattttcataaaacaattcattaaacatttctaacgtcttcacaatttctggaagtaaatgaagatataatttagagatggaattattaaaataattgcctgtaatcacactgctaaatttataccaaactatacaaaatccagattaactttgtggttgtgaattatgtgtattaagagtgagatcagtgggaacactggagtcatttagataggaattatatttagtcagcacatgggggctgtccttggaagggtctttatgtcataagcatggtggaataattctcagatcttcttcctttactacaatttccaaaatgaacccccaaggagtgtaaaataacaggatcttctgtgtctgtgttctacccttctccctttccccactcctcctctctgttcctttctctgtctggcataatactgtttacatttctaatactaaaacttagtctgaaaatttgcagcctatcaaaaactaaagcttaagattccatccacctcaggcttttgcctttcaaagatggtgggcaagttagtcaagctagtgaagtttctacagaatccttgttagccaaggcaagggaggatatatttggggatgggtattttattctttgagatcgtggaatgatgttgtgttggacaagtgctctccaaagggttaatgttagagttctaattttccttaatgttcccctatgtgtcctatttgttagttgattcattcatcagtataagacttgtaagcttttaacagtgaaggccgagactttttttaggttatttttattttaagagttttgtctacatgtatgtaagtgcactacatgcgggcctagtgcttgtagaagcccaaagagaagagagtgtgagattccctggaactggagctgcagactcctaggagtttccatgtgggtgctgggaagcaaatgctcttaaccatggccatcttctagccccagctgaagggtctaagggatttaaaaatcccttaagtgatatcagaaaattatccactttgccttgggtaatgtgaacaaccatcatccagaaaactaaaaagctacaaggacggagactggtgagttagggaactggtttttttattagacttgtattttcattttgatacttgagcggtaaaaattatattgttgaaagtgtggtgtgtcttttctagtctaacagctttacatggtttttaatacagttgaattttaaggatctgttatttgtcttctaactgtcctctttactggatatgagctttaggcagtggcccttctgttcaaggttagtcctccctctttgagagtttaatttaaaacttgctttttgttgttacaattattatttttattattttttacataatctctgctgtctgttcttagtgaccagtgccgttttgtgtagtcacagtcactgtggggtcgggataatcatggtgaagttatgttatgaactccttcttcccaaataatctccaagtagataattttccaggaaatgattacctacatccttttgtcaagaaatgttcttttgatttctagcacaaatatgacagtatacaaatgattctcagataaaatgatgttgacagtattttcttttaacagtctgtgttaaactatgctaattttcattctaactttcgatattctttccacaaataaaagtgatgcctgatgtttagtt

SEQ ID NO: 184 - protein, 878 aa, Mus musculus
MPILLFLIDTSASMNQRSHLGTTYLDTAKGAVETFMKLRARDPASRGDRYMLVTFEEPPYAIKAGWKENHATFMNELKNLQAEGLTTLGQSLRTAFDLLNLNRLVTGIDNYGQGRNPFFLEPAIIITITDGSKLTTTSGVQDELHLPLNSPLPGSELTKEPFRWDQRLFALVLRLPGTMSVESEQLTGVPLDDSAITPMCEVTGGRSYSVCSPRMLNQCLESLVQKVQSGVVINFEKAGPDPPPAEAEGQPDISRPFGSQPWHSCHKLIYVRPNPKTGVPIGHWPVPESFWPDQNSPTLPPRTSHPVVKFSCTDCEPMVIDKLPFDKYELEPSPLTQFIRKSPQTCWQVYVSNSAKYNELGHPFGYLKASTALTCVNLFVMPYNYPVLLPLLDDLFKVHKAKPTLKWRQSFESYLKTMPPYYLGPLKKAVRMMGAPNLIADSMEYGLSYSVISYLKKLSQQAKIESDRVIGSVGKKVVQETGIKVRSRSHGLSMAHRKGFQVLQGISEDVPHRLLDLNMKEYTGFQVLNKDLKPQTFRNAYDIPRRNLLDHLTRMRSNLLKSTRKFLKGQDEDQVHSVPIAQMGNYQEYLKQVPSPLRELDPDQPRRLHTFGNPFKLDKKGMMIDEADEFVAGPQNKHKRPGEPSMQGIPKRRRCDLLRGRRQSPAVNSHIGGKGPPAPMTQAQPGLIKPLPLHKEATNDSIVDDVVENHVADQLSSDMTPNAMDTEFLTSPPNLLEPSTNHTEALGHEHLGNNDLTVGGFLENHEEPRNKEQSAEENIPASSLNKGKKLMHCRSHEEVNTELKAQIMKEIRKPGRKYERIFTLLKHVQGSLQTRLIFLQNVIKEASRFKKRMLIEQLENFLDEIHRRANQINHINSN

SEQ ID NO: 185 - DNA, 99475 bp, Homo sapiens
cccgcccccacctcgcggtccttccgcagtccggccccgccccttcccgaagcccgcctccgggtcggcccgcccgcccgctcgcgcgcacccgacgccccgcctctgcgcgtgctcaataactgtccccggagccggcctacaagcttcccccgcccctgagctgtttaaatatgctaatgaaaggatagggcctgaccagtagaacggcgaggcggtgtatcacgtggctcggggacgtgtcaggggcggagcctccgcagcccctgcccgagttaaaaccggagtgtgagagagaaaagcgcttcagtagcgagaggggctgagaaagtggtgacaccgccggggtgcggagggagtccctgaaacttctcccaacagccccagggccaatcttccctcagcccactcccctcttcgccagctcccaggtccccactcctgtaccgggggtggggtggggagccaggcccgtctcccgctgggacacacacaggggccgggagcggggacgggacccccgaggcgggggggacgaaccgacagacagacggctgggcgcccgccccagcgggcaggcaggcaggaggaggcggaggcgggggtacgacggggagcactgggtctggggagtttcctctcaactatcgggggagaaactccccgcagccggaggaaagacccagacagtgttttcctcccgggggccgtgctcccccgccccgcgtagcggcggtcgccgccaccggcgcctccacctctaccatctcctctttctccaccacctcgggccccggtgtccccggccagcactatgcccatcttactgttcctgatagacacgtctgcctctatgaaccagcgcagccatctgggcaccacctacctggacacggccaaaggcgcggtagagaccttcatgaaggtaccgactgaccgagcccgggcggcgaccccggcccggcggcccgcgggcggcagggtgggggagggcggccggggcgggggtgtcggggacctgactgcgggagctgccgggctcggggaccccctcccccaccgcgcgggcgggcgggcgctgcgagccgggttcggccggggcccgggctccggccccgggcggtgtgtggggagcgatctgtgtgtgggggacggcgtggaggggtggccgctgcgtgtgcggtactgtgggggcggcggggccgctgggcgccccttctccgcctcgtaacctcgcctctgtgcttccctgtcgcccgccctgttcctcctcccgtcccgcagctccgtgcccgggaccctgccagcagaggagacaggtatatgctggtcactttcgaagagccgccctatgctatcaaggtaacagccctcgccctccccctttcctcccttcccttccctgttccttcctcgctcgccctccccgcccccccattcacccttcattatgctcccctcccccacccgctgcgctcccagccgctgaggtctcttccctgcgggctcccaccccctcccccgctcggcagcgtcctagcgcggcgcggagtcgcggggccaccgccgtcccctcccggcccggcccggcagcggcggcggcggcggcggcggcggcgctgctatcaacatggccgacatttcccctccgcggcgtgagcggcagcaatgaactgtgggggatatttattcaagttagccggagtgacagccgggcccggccgcgcacagccccggtttgcattaaaggggaatcggcccggccggcccggaagccagatgcggggctgccaggattggtcttgtcagattcgtcctaagagggccggtgggacagctgcaggttaacttcctaagtccggctcccatctgcttccactagtaccttcacatacccaaattttgggtattagattaggtagtaaatttgtcagtgaagttataaagtattaaggcagttaactaccaaaacctagagaggaagctgggttattcctgggccacctttggaagagagtttcctcagcagcggtacagtattaacacgttaaccaagccaaaccaaccaaaagtgaagctgctacttggtgaacgtcagattataacggctctgtgtacatggctttaaaaaatgaaaaaaaaaaatcttacatttttcttttcaggctggatggaaagaaaaccatgcaacgtttatgaatgaattgaaaaaccttcaggctgaaggacttacgactcttggccaatccctaaggacagcttttgatttattaaatttaaatagattagtaactggcatagacaactatgggcaggtaggttgaataataaggtggcaaaatagttgatttttcattttgtggaaaaacacagtccagtccaaaaactacataacatgaaatgcaagtataaaacattccaaattaaaatagaatatgcacattgttcaaaggcaaaactcttaccctactatatatattttacatccctcattttttccccctctaaaatgcattggtattcaggattagaatctgaatcttttgctataaagttgacatacattggttttaatcccttgaaagttcagtaaagacctaaaaggaaaagcatcctaccacaccacactcatgttgtatgtgcaactattatagtggcttagagacactagttcgtgttcttcgtttctatattagtaaagatgttagaggaaattaatctgtttgttgcatcagggtttaatgtgaccatgttgtataactattctgaaaggtaagaagtttttcactggagtacagtcactggctgagaacatttaagttttcttttgaagcatacacagttaacaactattgcaggaagaactctgaattaaatttcaggcccagagttttgatttaaactccaaacccttggaaaaaaagactgctggaaaatatgaaagaacccttcgtttcttaacccccacaagtccttttattgcacttactttcatgtatttgaggatgagaggagctttaaatcaacaataattcactaaggaataatgcaaggtggtctattgtaacattttatgatattattgccctggaaataaaagatactgaacaatgtataatgttacatgtaacaaaggaatattatttccaaggagctcagttcttatgttgtagtgaaaagcactattcctaattatatattgggtatatgttgtattttcccaagtcccacagtccctagttttgtgagtttcgtacatttcagggaaattctttctgtgactacaacttttatttgcttcctattgaaggaaattgacttgtttctgttttaggaaattttaagcttcttagggataacttcagtgcttaagtgtctttggaaataactgaatttagttctataacatttaaaatgtacactgaaattcagagtgagcttaccaaattgaacttccaacgtttagttaggtaaatatgtactttcttaccacattaatacttttatgtttttcccatctctgctgcttttattttgcaacttttaataatttaggtagatttgcaatgaactttttggtttgtttctgtaaaatagtagtggatttccttctcttttatattcctttgtgatatgtagtgcaacacagtcttactgcttaaggttttcatccttacctctttgagttcaaagagatatttaaaacttgccattatttggttacctttatttggttgtcatgttgttagtgtatggcagaactattagtttcctctttttctgcatcacatttcataagtggtcaaggcatttggacatattcacctcctattacctattaaaaatacttcttaaagattgcttccttcgaaaaactgcttgtcatggagaggctgaggacatttgtaatttaaacctgtattttccttttcccagttgatatctgcccccagagaacactttagttcttgtctataaggcttaccaaaagtttgcgggaaaggtggtcctgtgctgttaccactttgaccaagagaagaacctggagattgggatgtttttgcatgtcaggatttattaattcaataacagagagggatgatgcttctcacttattctgatgaatcagcaaagattgcaaagcataatattaatgcttatgtcttgaattggcacattaaaaatgacactagcattaaaataagccactgttttcaaatgaaaatgataatttgagtaaagagtattgaattggaagaaaacattcttccagaagatttttttcatcataaaactatctgatttaaacatttcatgttttctattcacaacaaggataaatgattaggaattttggatgtctcaaatatttaatactgaatattgttcatgtgttttcttctttgtaaaagtactttgtatctgcctgtttgctgtggaatacttttattttgtaacttcaatgtctttacataagtatttcccctttcctgctctatactaggatctgtggtgttcacagtactaaatacttgtatgtaacgttagtagttgaaggaaatgagaaaagattaggtggaagatagaacgtatatattttatagaacatctaaaaactttaatgttctgaattactttcttaaatgtctgggttaatatatatatttgtatatttatgtagatatccaccattctcccacatatatgcacatatatgatttttcataactaattacaagactattaaatctatattgcatttgttaacttagttaacatacctacagataaaacatctttgaattattagctaggatgctatcagaatttgcagggcattagtaaggttaagtaactgagaaaaaagaatggttcttagtgaatgttttcctcaagcactttgggtatcccactaaaaaattccatgcctacagacattgttataaatatttaattttgataatcagtaccatttactgatatttctacagtaatggagcaatgtatagcctttagtcaatcttttcctttatagcagtactttaagttgcatatcattgcagataaatttgatacataagtttttcacgtgtgttcaacagagtttcaaataatgctgatcctttgagacctgctgaaagtctgaagcagccttaatatctaaaattaggaaatgtataaaatgtgagaggtctgattaaagttttatatgtagatgagttaattttcttattgttacaggtcatcctgttttccatcaatatatatgtatattttttttgagacagagtttctctcttgttgccgaggctggagtgcagtggcgcgatctcggctcaccgcagcctcctcctcctgggttcaagccattctcatgcttcagcctcctgagcagctgggattacaggcttgagccaccatgcctggttaattttgtatttttagtagagactgggtttctctatgttggtcaggctggtctcgaactcctgaactcaggtgatctgcccaccttggcctcccaaagtgctaggattacaggcgtgagccacagcacccggcccgatattttcaacattgtcttttttttttttttttttttttttcagtaaattatgttagttaagattagccaatatatctttactctggcctgcaagtccgtttttgttactgacctgattccacacccctgctacctgaagtatgttagtactgattaaattgttccaggagttagaatggcacctttcctactatgtgcccttggtgaagacaatccttgacagatatcttaaaaggagataaaatatgtgcttaattttttgaggattttctatggtgaatgtttacctcattgaaaaatggtggctttcgtacaatatcaaatttaatgattctcagggaaaagaattttaaccaattttatttttgagcataaaggtctattttgtaaacttaggagataatacagttatagttctaatactacttttttttccctttacctaaatagtacccatttaataggtagtgtgaaatacaggcttctttttgaaggctggcaggtgaagtagtgagaactccatttccatttgggtgcttggtttctcttagattatcaacaaatgtatgaataagagtttgatatttattaagctatagacatcttttcaaatgaaagtaagttaattactatacctgaaatactgctgtgttgaatataaactggaaacacaatgatgaatagtattttgtaaattttttaattcctttaattaaaatttttttttaaattgtggtaagaaacacctaacaaaatttaccatcttaaccatctttaagtgtgcagttcagtagtgttaagtatattcatattgctgtgcaaccaatatccagaacttttttatcttgcaaaattgaaactctatatcaagtaactcccagtccctggaaacctctattctactttctgtttttatgaatttgtctactctggatatcacagttaagtgaaatcatacagtatttgcctttttagatgggctcatttcacttagcataatgttctcaacattcatttatattttagcatgtcaggattttttcatcctttttaaggctgaataatactctattgtatgtaccacattttgcttatccacatatccattgatagtcacttgggttgcttccacttcttggctgttgtgaataatgctgcaatgaacatggttgtgtaagtaactttttgagatcctgcttccagttcttttggatatataccctgaaatgaaatgacaggatcatattgtaattccattttaaattttttgaggaagtaccatactgtttttcatagcagttgtaccattttacgttcctaccaacagtgcacgagggttacactttctttatatcttcactaacacaattttctgttttactttgacattagccatcctattgggtgtgaggtcgtatctcattgtggtttttatttacattttcctaataattatttatgttaagcatcaacatacgcttgttggccatttgtacactgtctttcgagaaatgttcattcaagtcctttgcccgttttaaaattgttttttgttgttgagctttaggatttctttatattttctggatattaatcccttatcagataaatgatttgcaaatattttctcccattatgtagtttgcttttatactctgttgtttcttcagtgcacaaaatttttatttttgtatggtccagttacatatttttacttttattgcctgtgcctttggtgtcatccacaaaatcattgctaaatccaatgtcactgaagcttttctcctgtgttttaagagttttatagctttagatcttctgtttagatctttaatctattttgaattaatttttgtatatggtataaggtaagggtccaacttcattcttttgcatgtggatatccagtttttccaccaccatgttgaagagacttgccctttcccatttgaatggtctctgcaaatccctgaacttttgagcctcaataatttttgttggtggagagggcactctcctgtcaaacttgcttaaatgttttttccccatctttattgtgtaaaagaagagcagtggctagaaatgtgagaattggaatcccaatcttggcctcgccattgaattattatgtaacattgagcattcacattactattttgagcctctgctacttcttattccaagttggcaataatgaagccattgtacctttaatatagaattgttgagaggtttaaatgggatgatatatttaaaatgtaccttattaggatgtctcactagacaaaagcatccttttcctccaaaagattagtatgtttacctctagttttctatttttttcagctttaattttgaaattaaaattataaaaatcttcaaagctgattattacatgctttaaacatctattagtatcacgaagtatatgtttttctttgggctttgtattgtatcccagaaaagcaggtgtgaaagaaaattaatataacttggccaaagttgtctcagtggcatttaataagcataggatgatgtttttaaagaagtgttaaaacaatttaaataatttagcagataagtcagaaagtcattcttttgcaagaatacttatgtgaaaaaagcacatgccttaggattctttcaaatagggagctccccctagtgcgttttagatgagatttacacaagtttgatttgcagggaaccttttaggagcacatatgttgggtaaatcaagggatagtttaataagatttaactgagctcaaagtagtacaaaatggatatgatttatttcctatagagcattaatttaatggtggtataatttaaatgagaaggaatatccccaaacccagattttattttcttttaaaacatttgcaaaatatttcttcagaattttatactctaaaactgttttctaaaagaaaaaattctccagtcatgatctgaaaaaaaaaaaaaaaagaaaaatgaaaaacactatcctaaggatgttattgcattctttttttttttgggatagagtttcactcttgttgcccaggctggagtgcaatggcgtgatcttggctcactgcaacctctgcctcccgggttcaagccattctcctgcttcagcctcctgagtagctgggattacaggctcccgccaccaccctcggctaatttttgtatttttggtagagacggggtttcgccatgttggccaggctggtctgaaactcctgacctcaggtgatccgcccacctcggcctcccaaagtgctgggatttacaggcgtgagccaccgcccctggccattattgcattcttaattagaaattgttcaaaacaaatcttaaatacaaaagtcaaaaataggccgggtgccatggctcacacctgtaatcccaacactttgggaggctaaagcaggtggatcacttgaggtcaggagtttgagaccagcctagacaatgtggtgaaaccccatctctactaaaaaaaaaaaaaaaaaaaaaaaaaaaaaaaattagctggggggtggtggcatgtgcctgtagtcctagctactcaggactcctggagtcctggttggaggattgcttgaaccccggaggtggaggttgcagtgagctgagatggtgccactgcactccaacttgggcaataggctgtctcaaaaaaacaaaacaaaacaaaaacaaacaaaaaaccaaataatatattctactttaaagagcattttactttctttcgatataggagaatatcgataattatgtattatatacagctggaaattaaaagatcaggaacaaatctaatatttgacatcattggacttatttgtgtattttgaattaaggtcatttgtggtcaaaattagttaaaaggattgtttatttagtcatgttcatgtcatagatttctacaaagagattatatagtattttatagcttgaaatgtttctcaaatatataaaatgatttttggccataataaccttgactcagatttatactctacaattaaattagtcttggtggacttttcttgttttttggggctttttaattttaaaaatgtttagatacaaagtctctctgtgttacccaggctggtcttgaactcctgggctcaagcagtctttccaccacgccttcggagtagctgggactgcaggctcttgccattgtactcagcttaaaaaagtaatttccttatataaactttatttttgtttagtcttactattagtctataaaagtttaccatggttgccagactttaaacaaaatactaaatttttaaaaaattttgttttggtttgtattttctgatctctaacatttttattgagatgtaacttaaataaacaaatctgaagtgtgaagcttagtgaattttaaaatatacactcttaaaaaaattgaacatttgcatctactgacaagttttcattaaactttctgtgttttattattattttcatagggctttagaatggaagtgattttagaagtttactcaattttcctcattttgtaggtgaagaaaaggcatagaaaggttcagaggcttaatttcttcacatttatgaaatatttttaaaaattgtaattggtgatagaacagttatggagattttattaaggatttgtatattatttaataacattttatttaaatgtataagcagtggatctgagttgctttcttcagttttgtgtatagttctgtaatgcagtatgatttctttcagttcttgtttgaaagctaagcttttcattttgtctctgttacatttagtctttcttgtaacattctatctaaatactgtttgttacaaaattagctttagttggattccttcctccctttgtttggcagaaagtaaatgaatttagggcagcggtccccagcctctttggcaccaggctggttttgtggaagacagtttttccatggattggtagaggtggttgggatggtttcagatgaaacttttccacctcaggtcatcaggcgttagagtctcataggagcgcataacctagaccccttgcatgcacagttcacaacagggtttgtgctcctatgagaatctaatgctgctgctgatctaacaggaggcggagccccaacggtaatgctcacttgcccactgctcaccttctgctgtgccacccattcctgatggggtccaggggttggggaccccgatctaggggataaaccaggaaagacttcttagaggtagtagcatctgaagaataaaagtttactgagaacccagaacccttgcaggttagggggcaatgcagagtgaagatcatgatcaatggccagatgcgatggttcatgcctagtaatcccagcactttgggaggctgaggtgggtggatcacctgaggtcagatgttcgagaccagcctggccaacatggtgaaactaaaaatacaaaaattagctgggcatggtggcgggcgcctgtaatcccagctacaggcaccctcaggaagctgaggcaggaaaatcgcttgaacccaggaggcaaaggttgcagtgagctgagattgcgccattgcactccagcctgggcgacaagaacgaaacttcatctcaaaaaaaaaaaaaaatcatggtcaaaaacataggagaggctgtccctgtggctcacacctgtaatcccagcactttgggaggttgaagagggaggatcactagaggccaggagttcaagaccagcctggccaacctggtaaaactccatctctgccaaaaacacaaatattagccaggcatggtggtgcacgcctgcaatcccagctactcaggtggctgaggcaggagagtcacttgaacctaggaggtggaggttgctgtgagccaagattgtgcgactgcactccagcctgggtgacagagtgggaatctgtctcaaaaaaaaaaaaaaggctggaggtggggaggcctggggacgtatgggatagttgacaggattttatactgtaattactttaaggcctagattctaataacatacataagtatttaatggcactttttggttttgtgcttcatactttaagtttctgatgtgtagctagttaatatagagctattaaccttgttcattagtcaatttttccaatgtagtatgccaaccagtattagggttacatttataacttttttcctggagagttgatgagttaactaccatattttcatttaacttaaggtagttttgaaaatttctaagcattatatcttaagattcagaaaaataagaccagatccacttatgaatttccattccactcgtgacctgacaagtcgtataacctctcagcctcactttccccattagacaaatagaatgaaaagacctatcttgcagaactgtgataaagattaaggaatgtacaacataatttattattgtaacacaacctattaatcatttttatgtattttctcttatttgaattttaaaaattgaaattatggggtactagaggtttttttaatcttgcttttttcagaacaagcagcatggtggtatggaaagaactgctgtattagaactggctgtgcctggttctgtcactcactagcttatattgtattgaaaagtcccttaatctctctgagcatcaagtttctcatccatagaattgtgattataccaatgcttaaattttgtgaggattagaagtaatatttgttaatcatctagcaaaagtgcctgcctggcatatggtaggggctcatttatgatgatgatcatcatctccagtattacggtaaacacttaacaggataaaagctttttagtctgaaacctttgacaaaaacagaattaaggttgttccataacctatcatacagttatgtatcgcttaacaatggagataggttctgagaactgcaccattaggcagatctgttgtgggaacatcatagagtatacctacagaaacctagatgggatagatgactatacccctaggctatatggtatatgacccattgctcctaggctatacatctacctgtatagcatgtaactgtactgattgctctaggcagttttaacacttacaagcattcatgtgtctaaacagatataaacattgacaaatacagtagaaatatggtatgaaagataaaaaatggtatacctagatagggcacttaccatgaatgtagcttgaggactggcagttgctctgggtgggtgagtgagttcgtgatgagtgaagtgaaggcctgggacagtacactgctgtagactttataaactgtacacttaggctacactaaatttattaaaaaattttctccaataataaattaaccttagcttactgtaactttataaacttctaaagttttaaaactttttaactctttttagtaagatttaagatacaaacatagctgtataaaatatttatatccttattctgtaagcttttttctatttttaaaattgttatttttttaaaaactttttttttttttgagatggagtcttgctatgtcacccaggctggagtgcagtggctcgatctctgcttactgcaagctctgcctcctgggttcacgccattctcccgcctcagcctcctgagtatctgggactactgccaccacacctggctaattttggtggtttttttgtatttttagtagagacggggtttcaccgtcttagccatcatgctctcctgacctcctgatctcctgacctcatgatccgcccgcctcggcctcccaaagtgctgggattacagacgttagccactgcactggcctttgttaaaaactaagacttacactcatttttctaggcgcacacagggtcaggatcattaagatgtcaggaggtgataggaatttttcagctgtattataatcctacaggaccactgtcatgtatatggtggtctgtcattggccaaaacattatgtgatgtcttactgtacatccatcatgagaagccataagtagctatccagttttttctggctaaagtaattttcaaagcaagaaaggttttaaacttctttgagaaaatttagagtttatttctaggactttgtatattttagaattcacgttggtgatggttgggatgggggtttaggggaggtgctctcctccagaagaaaagtcaagtgtaaaatatataattccttttatttgtcgtgtagatttgtgtaggaaaagacataataggataggcctaggaagaatttttttatatgaagatttttttttgaagggcatatataattggaaattgattattggtatatggagagagagaattgtacatgaaaagtactataacttaaaaaaccttacagttaagaggattagttgtaaccaaaggacaaatttatgtcagtctagtgattagtcctatcaaaaattattctagctttcatataacctgttttttattgcctgttttatctgtgacatgttgacatcttccttctattagtttttgcccaaatgaggtgtgggactcctagtgaaggtccttggaaggattatattttctataaaactttattagggacatgataacagttctgaatatgtgagaaaaagtaattgtatactattaggtgatgcagtttgtagctaggaaatgacagagttgatgctggtgtgtcagagtaaaactttccctttgtcttaaagcgagtgaaccttgttaggtactaggaaacaacaacagtcttttggttattctggggtttcaacactggaaatatctaataacagaattattctgaaataattgaaaactattttaaataaggaattgaagataattgaatatgcagtgtgaaaggtcaggctgcaagtgacagtgggtgatgttgcaagacaatgacaaggtacagtgcttttggattatcaggaattagcaaaatgatgtcttggtgtcctctggtaatttctgagttgtgaactatcttgcttatttatatactttggcaggtaatgaaataatgaatgtaaaattttgaattttgtgtaatcacatttcttaaaccaataagttagaaaggaaaaccaagagattgcatccacaagatcaggcctaaataggtagtagaaagaatagaaggtctttattttaaattttatttttaattcagaatgggcagtgtctaatcacaaatgagattatagtgaatgtaaatcttaatgtaacaaaggattatcttgccatgttcttaaagtttccattttaatgagctttagtaacattctaaaacatgtagcaatctgtgcagtcatccgtatgtgacatctgcttcttcatgaagtgcatttctaaggtaaaactattggtttatttgtatgtatagttaggaaggcttataaaactttttttttttaatgataggcacaagtattatgtagttagattttttttgtttctggaaaatgttatctactttgaaaattttaaatctataaacacttgggaaggtgtttagcacaagcatcaataaatgtttcaatcagaatctagcaagaaaggattcttagaaacttttactcctgtacatgtactgtgtaatggatttagagaaatttgtttcctcctaaaaaatcttagcaatgttgggttagtaccatttctttccttgaaaacaaaaaaatccacattttttacgaaccagggccccttaaaactaatctcacattatgtcttttttttaattattattgtttttgagacacagtcttgctctatcgcccaggctagagggcagtggcatgatcttggcttactgtaatctctgcctcccaggttcaaacaattcttgtgcctcagccttcccagtagctgggattacaggcaagtgccaccacacctgactaatttttgtatttttagtagagacagtgtttcaacatgttggccaggctggtctggaactcctgacctcaagtgatccttctgcctcagcctcccaaagtgttggattacaggtgtgagccatcacgcccggcctcacattatgccttacccaattattttcagattggccttcagccatagcatatgggaaacaatatactgttagagttttccaagtgcttttcatgaattttttttccctttttaaaatttaatgctttattgctaactttcctgatctgaaacatttattaggcagttcttcattttcagttgtagcctttaagatatttatatagaaggctgtcatagaatgccatcttcttttgtaggacagttgtgtgtgtgaattgattttttttttttgagaccatatttgtagtgtgatgtgtagaaggaagtaaccagaatggttttatctgcttctttgccctacattcaaggtctgcttgtgatagtatttaaaattgagttcagtgctgagttcaagatgggatttaaccagacttttacaaaggtagcatctgtagattttgtagcagtctactcaaggaggtgattaatcttgagagactagacagatttcttttaggtcaaattaaattttaccattattgctgtataactccattcacctatctttgaaaatatgtttacatcttggtttttatttatacgtttatttttaaaaaacatatttctaacatgttttttattacatgcttcactagaataaaattttcccaagttattattacccagtttatcctgaaatcttagcctcaggcagtcctcccacctcggtctcccaaagtgctaggattacaagtgtgagccaccgtgcctggccccagtccatctaatgtatgtattagattcttagaatattactatttattaagtaaagttatatttctgatagcttaattactccttatatgacagcataaacactatttgcctggcactactttttaggcattccccagaccagtttgttaatttcattcaaactttagattccagttcaagtataaaactcaaattctgccaaattattaatatttcagatatattgagtttatattatcgtcttttgtagttatacttagtcttatcaattattgaatttccctaatgttattattatttttttttacaaagtcaaactttagtgattctgcagttcttatggtgacttacgatttcttacattattactcttcagtctattattaaatcaaattccaggatggagttccttagtcgttacattaaaacagatatatggaactcccccctacttttgcttaagtcatagtattccatctgtttttaatgctgttgtatttttaacataaggaattacgtggttgaataaaggaattgtatcggaacacagtcgtgtaacggagttacttgaaactaaaaatatatttcttatactgtggaattctaacatgttttctgtagctgtagaccttaatgtattctgttaccagatttttatattctagcagattttattttagaataccaaacacatttttaattttgaagagtatttgttttgaacatataataaatgcacatggttaaaaaaaagttgaagtattataaaaagttacccaattgtttacttcctttctatggaggcaaccatggctaatcagtttctaacgtatccttcagagatcttttttatgtggtcaaaggttttacaagggttaatgtcttaagatgaatattttagagtttgacatcaaaagactcatttatactacactacctgagattttaacaataaaaataataatcttactgaaatctaaaacaaatgtgaaatttgtaattctggccttggaatattgatttaaatataagcatgttaggcctttattgacttaagtaattctgttttgtttgtaatatgttattacccagtttgtgtatttatccctataatttaatgaacctcctccacctttaaaaaaattaacagtattaatgacaatgaattattgacttgacaaacatgattagcacatcagaagattttatgacccgtttaagggtaaggtagcattcctatgcccctcctccactacattttcagtttcttaggtaagtgaaaataattgttttcctgagatcaggttagtttatatttggaggaaattaccttttcttagtattttcaaaattttttttcaaaatttgttgtaacattgcaaaagcattttctttcaaaaataacataggttataatagataatatctgtttacattaattctttaaattttcttattattgagattttatgctttaactgagtaatttaacaccatggtaattggttgttgagagaactataataggaaattttaagtgaagtaaaaggttttgctttatattatcttgtggcagaactcttacttgaggtttttgaccaaaattaaaatgaaaaatttttaatgacagattgactcctgttagtaagtagctctagagctagaacattatattttgcattatattttctagtgatatgtttggatttctttatgacaggaaccactgctctgagagtaaaacgtgaatttattctgctaatagcaaaagtaaacttttagtccctctactggctgtctttgttgtagcagagcttagattttttttttgttttaaatatatcattataattatgataaaggctacttataactttatggccaaggtgaatattgacagaacttctaaaggattgtctcccaactgagtgactttataaacatacttacttaggaataacaatgtaaaataattgctcttaaatataaggatttgggaattattaaattgcgtaggcttgacaccagatagtgaataacattatattgcagtaattaagttgtaactctcatttagactttggaggtgttaaaactttatttttttgtaaaacatgacaaaaaacaatactggcagacaactaaaacttttttaatttgctgggtaaacaatgttgacagagaaagatgacattatgcagcaagaaacagtgcaaaacagtatataagaaaactttcttggagctacatgttcactttctgctagtgatgtagaaattcatgcttaaataaatttgttaatgtcaaacatttatataatagagatgggggcacatttttcctgaagaaataataaaacaaccttgtgtgtataaattacattaacttaatcattattctaatttttgtagtaactgattattgcttttcttagtgtgattcttgactaagctctttaatcttagaggggaaagaatcttaggcatggcgggataattggtacaatgaggatgataataatatttttcttttttcttttctatgtttgatctttatctgacttttccaaaatttaaagtcactaaagaacttattattttatcttgtgtttgtgtatatactctctgaaagttgaagttatattgtttttaaaagtaaacattagtatatattgtgttttgtttcagtgtgtgttgggggaagatacactgattttatacatcaagaaattaatggctaagtaattacagaatcacaggaatctaccaagtaaaggaatagttttactatagttaattttattgcagaaaggatatattaaaaacaaaacaatctgattataatgccattccttgttgggtaaatgtggcacaatccaggttagtatggaattatgtccaagagaatttagcagctgccaataggacctccaggtggtacagaaagaccatgtggattttagaattagaatagcttaataaggttctggctttgccaccatctaggccaccttgagttatatcatttaatctccctgaatattttacctcactaagtttttttagggtcaaatgagataagtgctttattgttattatcaagacgatagcagtaatgttattgttattatagtaatttcaggcccgtttaagggtatcctctgtggagagtattttgtgtaagactagtcaagtttcaactaaaagctttgttttgttgtctaagaaaaagtaactttggttttagtgtttgaatttagcttaattaaatttaataactcagactttctgttaagttttaatatattttaacttaattttgtagacatgggcctttaaaaagtattacctttcgggtggatgtcatcatctatatgagtctgctacatggtagattatttttctttaattagaagtatgattaatctcttgcctctgaaagataattctaagtgtgcttatacaggaataaaagtgaatgggtgtcagacttttggtcagaaaatctgatttctttttttgagacggagtctcactctgtcgcccaggctggagtgcagtggcacgatcttgactcactgcaacctccaccttctgggttcaagggattctcctgcttcggcctcccgagtagctgggcactacaggcatgtgccaccacacttggctaatttttgtattttttcatggagacgaggtttttcacagtgtttcctagactggtctcgcagtcctgacatcaagtgatccgcgtaccttggcctcccagagtgctgggattacaggcatgagccaccactcccagcctgattttgttttatgttaaaatgtagaagtgatatagaagaccctactacaaatatttggtccatgctgtggtggcttttagagctttgctgatttgtttttgaaaggcaccaagtcaacaaaagtagtttagcttaagggtggaagcaagataatatagtttcgaagctattaggacctcttggttttctttatctcccttaggcaatttttgagctaaaatactggtagagaccaagagagagatttattgttatgtgtacatatgtttattatgtatgagagtagagattatatatcatacacttaatagtaaccactcaaatctttgaatggccaacacgaatgagtagatagtggatggctgaaagacacaagagggagatagtgctcctttttatactctagtagcccagcaaattcatgagttgttatgcgttgaatttggggagtacacatttatattgaggtaaaggtaacatacattttttgaatctttttgaagtttgagtaattctaaatggttctgtgaacccaggctgatttgtattaagctatattcagtgagtcaatgaataagttgaagtgttttgtgcccagtacctgcttagtggtgtggaaagaaatatgacatattctttgccttcaacatattcaaacacatgaaaaaatagcaagcaatacaagatggtgtttttttttttttaataaattgtggtaaacacaacaaaatttactgtcttaaccatttttaagtgtatacttctgcagtgttagatatattcacattgtgtaagatggtgtgtatttaaattcatatttaaattaaaaattatttgaaaaggtgggaggatagatgttgtagggaagtggtattcaaattgtgctccatggaaccactcaaatccaattttaaagaaacattttatttaccttatttatttaatttaaagtgtaaaaactaccactattagaatatggagatggaaagatgtgattactaaaggccatagtaatcagggaaggcttcgtggaaaatgcagagatttaaactgggccttaaggaatgagtggcagttgggtaggtttgaggagggaagaggaaaagcattctactttagggaaacaatcaaagctaagagttgggaatgaacattgcctgagaagacctatattattagaatttattatatattttgggggtgaatggtatgagagacaatataatgtaatgtaataattccccaaaatgagttctttttaacatgaatattacagaggaaaaggagggataaattaattcatgttttctccctgcaagactcctgtgacattttaatgctgctatgcatttagaatcttctagagattatatctaacatattttaagtttatttaaccaaaggaatctttctcccccggaaccatttttttcttgggcaccaattagaaaagtgcacgtgtcacttacaagttgaatgatttgatcaagacgatctattacatgtcccccttcccactttacgatgattaggttataatcatataactaactgtgaattcattcaataaatattgcgtatatattataatatgttaggaattgagagttgtaagagaaaggttataggaccatagaatattatatgtttataactcttctacattcttgttgttctaagtatggtctgtggctattagtgtcttctagctgccagtcttgttagaaatgaagaatcttagtcttcatcccagacataatcagaaattgcattttaagatctccaagtggctcatatgcacattaagaaattgtcatacacagttctacattttatccaagaaagcttcattcaattcttggtaccattagtggcagagaatttgatacctttgatttcaaatacaaggtttaccctcttgaaatttatatcctttggtcttagttctgtcagtccttcaaatgggagccatttatatgtaaaaggcaagcttatgtttgtcttagtcccttacagatgtgtcgcctagaactcatcgttgtgctagtagagtgggttggccagagatttgaatggaagctattgaagttatctcaccttctatatagagcatttgagaacccgtgctactctgttccattgcttttgctaccactatttttgtacttttctctccaagcattttctttaggtaaccatttttaattttaacttttcatcttgtactgttgttaaatttttgctgaatttagagtagctctactatttccatagaaatagctcttaaaatctttcaaatcatttacctagttatttgcttagacatttcgattacatgcataccttgtggtaatgttcacctactgtcttgccttcctttttaagaaagtttctcaggaaatgttctttttttattgtaacttgtaatatctacaaaaatcaaattattagaattgaactactagggtcccttttaagaaattaaatactcttagtaacataaatatactccctctaaaaatgaaagcaatacacaaatttataaagaagtgaaaaatccacctctttctctacctaatccctctttctcagggttaatcactgtttagtttatgtgtcgttctatatcttttcttaaaatgtacaaacaggtacatactacatgtaaaatgaaactagaaagggagatcgtatatatgctgttctgagaattgactttttactttgtaagccaaagtctaaatctttgtatgatcaatgtgttttttgactttagggaagaaacccttttttcttggagccagcaataattatcacaattactgatgggagcaagttgactaccaccagtggagtccaggatgaggtaagttgtgcttatattacatggattatgcaaatgcagttgaacaatcctttatttttgtaggatactgaacacctttaataggttctctcgttgattatttgatgcaatttagagtcatctgtctcctatggcccatctttgtttgtagcagtgttcttattttcttgaataagaatctcttctgtgagaaatgtttgagcatacccacacctcatttgtatgtgtaattatgagtttatgtgagggtgacagtttcagtctgtcataaatagtaaaatgaattccttagtttttttcagatttaaaaaagggaaacagcgttctagtaatttcttcctatatttcagtggattgtcgttggcagtccagcgactgtggaaactccttggctagagtatagcaaagccaagaagaggtgttaagactaggaaaagtaaggtttttcgacatttttgttttctctaagtcaaatgtattatacatatatatatatatatatatatattttttttttttttttttttttttgagacagagtctcactctgttgccccggctagagtgcagtggcacaatcttggctcactgcagcctccacctcctgggttcaagcgattcttgtgcctcagcctcccgagtaactgggattacaggcatgagccaccatgtctggctaatttttgtaattttagtagagatggtgtcttgccatgttggccaggttggtctcgaactcctgacctcaggatccacctgccttggcctctcaaagtgttgggattacaggtgtgagccactgcacccagctgtataaaaaatttatagctaaccttatctattctacagcaacattcattatgcagagttgtgtgtggtgtggtataatgaatataatagatttttttaattttaaggtgtttttactatggtatttgaactgctctttaacatgggctgatatagaaaggtgattgttttgatggagctttattgtttgcatttgctttagtatcttaattcccatggtatttataagggtttaattaagcaggaaaagtatacattttaagttcagtagcttttagaattactttatttgtgtgacattgtggaatacaaattggacatggagtcagggcatgtgggtcctagtctttgtttatctactttctagcagtaaactttgtaccagtgacctgacttcctaatttctatccttctccatgaaataaagagaataacatttgccttacttcatagggttattggaagtttgaaataatgtatatgaaggtacttagtaggctgtaaagagaagtatatagtattattctttcatgaggcattggaaccactaaagagatataattctctgctcttatttgggggaaaagagctaaaattgttttatttgaacagttgataataaagggaatttaggatataattcatggagatagagctgaaaaatttaggtagattataatccatgattaaataatttatagtctatatataatcagtagccttggaatgctctgtagctgaacttgatgggcttttgggctttgttagattagttgacatgtacagccaattgtggtcctgctactttcagaaacaggtagacgtggattatataaaaagcaagcaataaaaattcattttagccgggcgtggtggttcacacctgtaatctcagcactttgggaggctgaggcgggcagacatgagatcaggagttcaagaccagcctgaccaacatggtgaaaccctgtctctaccaaaaatacaaaaaaattagctgggcgtggtggcgcacacctgtaatcccagctactcaggaggctaaggcaggagaatcacttgaacccaggaggtggaggttgcagtgagctgagaccgtgccactgcactccagcctgggcaacagagcaagactccgtctcaaaaaaaaaaaaaaaagaaaaaaaaagtcattttaaatttgaagctctcaaattaatttttcttcttaataggacacataatagttaacagcttcattcaactttatatattaataaattaaaagtcttttgaatgtttgttttgtttttatccataatgattttgcttgagaagttatttctgttttctgttgtaaagtattcttatgtgcgaggtgatgcatttgaggtgctgtctactgcctttgtagaaatgccctttggggtacaatgtattttgtttccatatgtctggatctgttttgtttgtaaaatttgttttgtggagacctcttctagcttaaaaatatcttgaaatatacatgtgtattggaattgctcacctttcttcctatgtctttccttgggaaggattttggaaaaatagggcaatgtgtttataacctgaaactaccttgctagtaaggttaggaagattttcctgtgggcagagtttttaccttttagttctatcttttacaatactagcatagtattgacaacagagcctatatttttaaaaagtattgattataaacattggtgtattgaatctggtagtcattgagttcaaaattgattaccgttgcaccttattatctgaggtggaaggttcatttgttttaaagcaaaagtaaattattttgaagttggaacataggccggtgagttgtttcaaggttaggaatgtctttgattccctgcgtgttttcttcttaatgtaccaacgagactctcgttggagcaatgagaaagttatcctagattaatttttgctaaatgttgtgagatattgtgaaatattctagcctaaataattatgggatttgttttaaggagcttttcaattcatagaaaagcataaagatgctttttgtattgttcttctgtgtttgtattgtgcacgtgcatgaatgctagatatgatctgtattctggttcctactagggaataacaattttgcctttatatcactgtcttttcacatctctcaacctttgcctctggcagaacttgattcttttttagatttattcagtgtatgaatgtgtcattaatttccacattagagatatgtgtacataattcctgtttggcttgtggctggtgttggtatgacctattactttttatggagttgtataattccacctgtatgatatcctttgcttaagagtcatgttatccaacattgtatattatatctgttctgttggtgctgtttttcaggagtaaatgttcttgctgctttaaaatcatccttatatcatatgaggaaatatagaactcatttagtcttatattttacaaatgagaaaattgagatccagggagtcagagtgatttgcttaggttataacatttgttactgccaaaatctagattagaatttatcaattccaaagacattccagcacctccagaccagtgctttcttcctgatacggctgctgcctttttgcttgattctaaatttgtgtgttcttaaaatttaccttctatttatctgatttcttatttgtctacttcagctttctatgtaagtgtcttttaggtattctgttcttattcagtgttccatgaaaaactattatgaccagagcatttctaggcaatgaggataacaaagataaacaggacatatctggttcttaatatttaagttcacagtgttatgggggaaatcacctattaaatggttttatgaatgataaaataaggatacatactaagtgtgtgggagtactaaagcaggggaagggttaatattacctttcgtgtgtcaaatcttgtataatgtgcatttttatagtataatttcatttttgaatgactgaattcaaggatcttatggatgatttggcatagggtgtggctcctaccttgtatctgtgaattttaggaagaagcccagtgtaaagttgttttgagcctagaaaatagttttcctagcggcaggaaaaatgtggtgccatattgtctcttgacctggctaagtatgtataggcccaaatgaaccaatttcttataacttgtttgtcagaaaaatgtaggaatactgttctctgggacagctcgtcacttagcaatgtgttatgagttaggaaagaaaagtaatagatacattatgaatgaaaatcttgagctgtatatgatcattttacattaatttatgatttcaattatatccttgggcctcatttaataaaagtccaggccattgtctgaagtgtcatgaatgtatttctagtgtagtctttttggataactgtctaggatttctgatgattacttggattgaattttatgtgtatatatttggctttttttttaatgcagctatttgataaaactggttgtagcattttcacttacgaggagtgtgtttgataggactttgaattctgaaacacgataaaactatattacttacttccttagtagttaccgttgatgttgataaacatacctgtgtccagatactcagtactgtttgtcatgttatataactgatatatcaaatgttttggtagaatcaacaaattagagttattgaaaaggattttcttctgatatctgcagataatcctctctagtactgctttgcaatggaaaactattctgtactatgattccaggaacacatggctaatgaatattgctcaatagaggagcccagaagaaatcctgccagtactttcttagtgatgaatgacattccaggatagtgtagcagttatttttctcttccttgaaagtgctaatagtagtattgtctttcaaatattgagatttctatatgctgacaagtccttctgcatctctttaccaatgttatgattgctgtggaggctaacgttgagagaaggtatttgcagccaaagtaatctgttgggaagagttttacttgcttattagctgtcccagctttttaagcccaactaggacaactacttttgtaacttcatgggatagatattcggtaagggcatgtcttcatagaaagagaatgagtagtctcagctgtgtattcaaatggctgtagattggggtcttctattccaacttgtgggttctcaaaaatggatgcaaaagtccaccatgctttgagatatggataattctaggcattgtaaatgggtttagtttaactggtgaagattataattatgatgtgcatttaattcttaatgattaaaagacaggccagaaatttttgaaatcagtttctagtatctgaaatgattaaaaaaccacagctccctcccctacctcccataaaatgtttttattcactaaaatcactaaaaatatttgccttagggtgtcaaaactctgatttcattgtatacttttaaatatatatttaaaatagttgcttttcctaagacacttagaattttggagaactttctcttttttgaaaagatctgtaaggaattttgagggatgccacagtggtgtgatagaaaatataaaacattttatctgtgttacatgtgtttgaattttcatgtttatcctgtagtagcctcttcatagtgatattactagggactcagtaaaaatctgaagattagctcttgtcttactgatttgcgattcagatgttctaaatacatgcataacactactgtatatgttagtctctgtcaattcatctttctaagaacatttaataagaatttgttgaatgtagaccatttgtatttctttttctactcatatttttggccctgttctctcaacccctggatttattactgctggtatgttataggaatatatacatctgcaattattagtagtttaaaaatatgtaattataataatgcataattaaagaagttgatgaaatatttcaatttaatatagtaagttttcagcaatttacatttgcagtactcttattgatatactttttttcaagatcatgtagtaagaaagactcttcagtacttctaggcaaacacaacaatggagaaatttaaaagaaatgctggttgatcattctaacaaagctgtatggccacagtaactaatccgctatctagaattctttgttaagatatatcaaaatagtttttattcagagggtgaagcaatttcaccctgtgtttattagcctgttagaaccaataagcaataagagagtctacatatgtaaggaaaattttatttagagatgtttctattatccaattctagctcttatatatataaagtactgtggtatttagaacagtagctttgaaatggctgcaggctgcatcaaaatcacctggtgtgccttatagaatacacatgcctttgttcttattctggaaattttgtttcagttgatctgggtaaggacctgggaatctgtatttttacagtgtctcatgtgattctgatgtacagtcaaatttagaaactatagttttagaacacaatctaaccacaattttttttaagctacacaaaaagcatgtgaaaatgaacaactttaacaaaacaggttagaaagttagaaatgtttttgacttagaaggccaccaaaaagtatttttttaggataaaaataattcttgacctttagaattgttaaatttgggaacgggtttccaagggatatggaactggccttctgtgaatatttttaataggataatttctaatttgcttgatattttagaataagttattgaatagcccccaaaaattaacttctgtgctgactgcagtcaatctgcagttactgcttacagtgtgctatattgaggactctccttagaccccatatatgaggagagaggctaagaagagaagagcagttaatttatattatctgtcatgtgtttcttatccctggcttaggaatttttatccaaaggatggtatagtattctggtatccttactaagccataattcctgatttggatgtccatgtaattagcattatacacacacacatgcacacacacacacaccccctaccttaccagatgagagcagtttataaagaattggtgatagttacacttaattttctagacagttgctgcaaaaatacccttccagaatgaattcgttagattttgaattgtgaaagtatattttaaattaattcagcaacagttttccttgtgatacatagttactttggctgtgtataagaatagcggcagctccatacgtttatatttagttctatatttatgttctaggtactggggacacacagatggaattaagcaaggctagaaaacgtattatctttgaagacaggcaagtaaataaacatttgtaatacattaagataaatctcatggcagaaataaacagaaggttctgagacagcgtaaagaaaggagtaaagttttgagggaagagtaaggaattgagccatgacatatcaggaagagaaaacagtatgcaaaagcatgaagacttgaaaacagtgtatcaggagattataaattgtacacctggagtatggaaagtataggtaggaagagtagaagcttgaaatgtaggtagagggcaggtaatagcaccctaaggagacaggacttcattctgttagcatttgcagggaaggtattgaagattttaagcaggtgagtcacatgatcagatttgcattttagtaagattactgtgccagcaaggtgaaaggtagactggagggtggtaagatgggaagagttagcaaactacatgtaacaacctagaagatatggggaatgccaaaacttagctagtgctggacaggaaggcagaattctgagaggttcggtaggtaagctaggcaggttttcaaagatgatttgtaagataggagaaaaaaggcaaagtatttgacaggagccctgaacctagggtccatgcttggtctgaggagagttctgtgaattccctgacatcctgtctacacattgtccatctgtgtgcatgaacttttttctgggtaaagagatccatagctttaatcatattctcaaataagtaaaaatatactggtttagtattattttccactttccaacttgggcatctatgtggatatttggtagtgttaactgagatgtgggtgataaaaaataaaggaggagaaaggaaggtaaagtaattgacagacaaagtatcattacctttcgtgtaaggatgttttaaaggatttataatttaacatttaaaacaattacctcaaagactttttcttgccttttaacattatgttttaggaaaatattttgtatttaaaaattgaaatgagcagattctgatagttaaattttttttttactttgaagcagatttaaataaataagcgttaaatcagcttttaaagtttgtttgaaatttaaggacatatgatatgaacatttaaaattgcttatttcaagcaaacattgaaaattctacagaatgctaggttaagagcagtgtgtgtgtgtgttttactctgtgtactggtgtcaagtaagtcagaggatactagcctaattttttatttaatagattggcacttttctgttaaacttagcctatttgggtgtttcatgcttctccatgtcagatttcaattttgagagaatgaaaatgttgagtatgtggttttctgatggtgcactctcttgtaaataacccttaggctgctagtcatttataaataccttgataatacttatttagctgtatttccatagtgattttatttaacttccactttcacttgttcttttcagatgtaatactgtagatattaaactttttagacttttatattaggaataaccttagtgcagtgactagaaagacattgaaactatgggctttacatcaaggcaaggctgcattttgatctagacaaggctgttttggtatatttttccccacgctctgtcttttcagattgaattactgatttttccccctttgttttgtttgttgtggttttgatgttttttttcctttcagctaaaggagcagcccagtggttttcaagaagtgctaaagtgcactgactgtctcatgatgactggtgcctcagggagggtcatgattcctggatacaggatcgacctgatcctggatgtcacttcaagcagtcagatcgtggggaaaagccttgtctaatggctagccttcctcaaaagtctgatgctagtcatctcggaaggcctcagaaaaagccttaaaggtgagcagagtagagtgtagttctctctgggggctatgactatttgttggagaatctgattcaacatagaatgacaaccctaaactgataaatccaggttcaattggtaattaactttgagcttataaattggttgatgatgattatcagaccccagcttttgagttagtagaaccaccttgctaagcttaagatctgtaagtgaggaactcggtatttcctggggctcttcacagctttaggttagtatctgttgtcttagaccgaaatagccttgctatcatagctaaggaacactttggttacaaaattgcacttggttgttaagtatggatagttttttttttttttttttaatttagctagcaaggtattctcttgatttgtatatttattagataccagttatttggtattaccaattatcagggtttggaaggataagtttgcatttgctttgtctgttataataaccttttttaaaaaaacatagctacctttgaaccaagtttggatttatgtagctcgtattttattgcattctgttgaagaatattagtactacctgcatcatttcaatgacatttttagcaccagaaaaagattctccagagatgttttgagtattttggaaaaagtttaattctgggcctctttctctgtgatttgaagcactcacagaactcagttattcatgtaataacattgattgctaataacgttgattactaaatttaaatgctaaagcttgtcctaagacttaactttttttttttaaatgaaccacctatattagtaaaaaaaaaaaaaaattaagtatgtaccattcccagtgtatgcacatttttaaatttagaaattatatatgtgactactgcattaatattattatgttaaaaacatatattaaaatagaactttaaaaagatgagaggaaaaaatttatacaaaggaaattctgatctttgcttcttgaataacatggatcatgatttatactaggggtcagcaaacattttctttgaagggccagatagtgaacattttaggtttttcagcctgtatagtgtgtactggaactattccactgttggagggcaaaagcagccatagacagtatgttaaatgagtgagagtggccgtgttcaataaaattttatttacaaaaaataggctctgggctggatttggttggtgggctatagtttgctgatcgctggtgtataccctgttttgtagactactgttctagaccttggagttgtattgtactacttctgttagatccttttcacattagttttagagagtggactttatggaattgatttttcctttatgaagtgggtagaacaccactagtagagagtattcagttaaagtgaacagatgcttattgaacagtagtgaagttcagatgcagggttaggtactggctcatgagtttgatatgagaggtacagttatggcatagtgtaagatgtaaaattattaaagcacaagctaataagatggtacagttgagaaagtgaggccggagctggctctaggaaatgtcttgagttggattttgaaaggttaattcaagtttgtgaagtagatgtatgcaaagacataaaggtcactgaagagagtttgggagaactgtatgtacctcagtattgatagctggcaaagtgttcaagaaaaacagcagcaggaaatgagactagatagattggcatggcacgtcctatattctctgccaaggagtttcgactttgtcttacagattgatgaaaaccttatagattgaaccttacagatgggaaccttatggattgaagagattttagtagaggagaaagttattagatttgcattttagaaagaagtagcgtggactatacaaagagcaggtttttttggcacctcatctgttttcacttcctcataaaagaggacatgattgtaggttgaactataccagacataaaattaagaaacttggagtgctatttagcaataaaaaggaatgaattgtgacatgctacaacatggatgaacttgaaaaacattaccctagatgcaaaggacctcatatagcattattccatttatatggaatgtccataaagttgattagtgcttgcctggaagtgtttgggagactgactgcaaatgggcacagggatctttttaagatgttggaaatgttctaaaactgcatggtggtgatggttgtacaactctgtaaatttactaaaactcgttgaacacataaaatggatgaatttctcaataaagttgttaaaaaattagaaagactttacctttgcaatttgttggggtaaaactttgttgaagaaagtatttcagtattgcaggttgtcaagtgattgctctttcctctgaacaaatattgaccttaaactactagaagctaaaaaaaagttttgattttttaatcaaaaattccttttggatgtacattggatattcctaaggatacacatttttaactgtggagtgtaacaataggaactaacaataaataattgggttggcattaagttttatgggattcactttgactttaataattttttttgagacaggatcttgctttgttgcctagaatttcttaattttcctttccttaataaatatgatatgaggagaaccttcttcattgcttatattggataatagtattaaagttagaaatagcctaagggaaatttacttgatttttttttttcaaggaaatatactaaagaaaaagctgatataggatgcttttaaatttataaattgtttcctcataatcttaacagttataggaaatgaataaagagaatgcaaaacaattggaaaatggttaatttcattcaataaatatgtatttagggcttaccatgtgcctaggcactgttcttagaaacagattgtgaaggactgttactgtattactttcttttattcctggctactaaaataatgtatgaggttgagcttaattattttaaaaaatgtgtaaacttaagtgtttaacttttattgtttacaaggtaatttcacatctcctgtaattctcaattctgtgacggtgaggaaaatgtcttagtaaggctgatttctacctaagaggcagagctaggacttgactgtttgttttattttttcaggtccattgctctttacactctagtgtgggattaaaagaaaaaaacaagcaacagtattgtactgcataaggacagtcatataggtcagtgagatagaattgagagtctagcagcaaaacacatacatttatagtcagtcgatttttgacaagagttaagacagtttaatgagaaaagaataattttctggccgggtgcagtagctcacgcctgtaatcctagcactttgggaggccaaggcaggtggattgcctgagctcaggagttcgagaccagcctggccaacccggtgaaaccccatctctattaaaaaatacaaaaaattagccgggtgtggtggcatgcgcttgtaatcccagctactcgggaggctgagacaggagaatggcttgaacctgggcggtggaggttgcagggagctgagatcgcgccattgcactccagcctgggtgacagagcaagactccgtctcaaaaaaaaaaaaaaaaaaaagaattttcttagcaaatggttttgggccaactgaatatgcatgcacatgcaagagaatgaaattgaacctctaccttatatgcaaaagttagatcaaaatggatcaaagacccaaatataagagctaaaacttagaagaaaacataggcttaatcttcctgacctaggattaggcaagttttagttagacatgacaccagaagcacaaagaacaactagacaaattggacttcagaattaaaaacttttgtttcaaaggatactgtcaagaaagtgaaaagatagtaacagaatgagagaaaatatttgcaaatcatttatctgtgaagggcatgatatccagaatatataaagaactgtaacaacataaaaataaaaagacaatctaatttaaaaatggtcaaaggatttgattagacatttctccagagaagatacataaatggctagtaagtacatgaaaagatgctcaccatcattagtcatgagggaaatgcagattataaccataatgagatagcagtttacacctactatgacatataataaaaaagatggacagttacaaatgttggtgagaatgtagagaaactgtaaccttcatactttgctagtgaggatgtaaaatgatgcagctgctttgggaaatagtttggtggttcttcaaaaagttaaacatagagttaccttatgctaactccaataattctattctggggtatatacctaaagaaatgaaaacatgtctacacaaaaacctgtaagtgaacatcatattaatgtcattcataatagccaaaaggtggaaacaacacaaatgtctattacctgatgaatggataaacaaaatatgatacatccatacaatggaatattattcagccttaaaaaggaatacaattctctcacatagtgcaacatggatgaaccttgaaaactaagtgaaagccagacacaaaaggctacttgatgcaaatttccatttatatgaagtgtctagaataggcaaatccatagaaacagaaataagtggttgccagaggcttgggataagggtaggatgctaatgtatatagaagggtttcattttcaggtgatcaaaatgttctgaaagtagacagtggtgatgattgtacaactctgacttcctggttcagccactttaaatagatgaatgaaacaaatagaagaacttgtatctttactctcatacacccacactattttcctctctggtgcctatcttctctatttccttttgcaacaaatttagagatcatttctgttatctccttgacttctctacctccttttaaatctattacagtctgacttttgattctacctttgttaataagatcactaataatgtccttatcttccaaatccaaatttgctttttagtttttctttcatgatgttttgccagcactattgaacactgttttttaaagcttctcttgacttctgtgtttacactttcctggctctgctttggctttttgttttgttttaatttccatccttgaccttagtgtatttgcctgtccctgagtgttactggtttagttttagattttcttacacgtttactgacatactcttggacaatttcattcccgtggctttatccgtgttcatctgcacagaagtgtgtgtatttggcctaaaaggcttggtgactcaacttactctcaaatagtttgtcaaatattaataattatatattactctactactccattttcatgctgctggtaaagacatacccgagactgggcaattaataaaagaaaggtttaatggacttaaagttctacatggctggggaggcctcacaatcctggtggaaggcaaggaggagcaagtcatgtcttacatgggtggcagcaggcaaagagagagagcttgtgcagggaaacttcctgtttttaaaaccatcagatcttgtgagacttattccctatcatgagaacagcatggcagagacccatccccatgatttaattacctcccatgggggtttctcccacaaaatgtgggaattgtgggagttacaattcaagatgaaatttggatggggacacagccaaaccatatcaatcaccattattattattgttattatataaaagagaaagaagtaaatgtgacaaaatgtaaactgtctatgaatctagatgaatgggaccctggagctcatagtacaatcactgcaacttttctgtgagattgaaatttttcaaatagagagatttttaaagaattttttttttaagtgaacggttctgtgccatttagtacatcctttcctttaaaaaaaaaaactctcatacttgtcagggtattaagttgctataacagaatgcagtagttctttaattgtgagtttcttatatattctaggataggcagatctgtttagtatacctttttccactgcatcatttcagtttggatattcttgactttcgaattgttcttggaaataattagaaagaagtagggattgggattgttggacggtgaaatcatagggagagaaaggaagttgaggaattcaatcttgagtcttagaactgtgtgtgtgtgtgtgtgtgtgtgtgtgtgtgtgtgtatagaagaactacatacatacatatatagaaggaagaaacggaaatgaatctataaaggcctgatagtacttacatattttcttgttattgtctgttatgttatgaataggacctgcggctgtattatatttgagaaataggatttaagaaatacccactcagtttcaccaaaaatgttaaaattttatttgctttaaaaaaagcttttattaagcttcttttccatctacattatccaagcaaatctgaataattgggactagagttggactagatgttggagggaccaactttctatttattaaatcacggaaagatttagcattagtttgattagaatgggtgctttcctgcccttaacacacatacagtgcctctttgaatgcatattttctgcaacaaagaaaaacaaattaacaaacaactagttgaaccttcaaggattctgaaaagcttctggcaaggtatattttttaggatattggttcagcttctctattgggacaaaaatagctggtttaaaaatacagaaggcttttcctttcacatcaaagatagaactggtagtagtcagggaagtggagtggttctgctctaagctattgtctagggttccaggtttcttctactttgttcctctatctttgcttttatctgaatggttgatgctggtttcacagcacatcatacaactggatttcagcctgtgggaaggagtaaaggcacacagcttcctaatataagcatgacctaaaacataaatgacgttgcaatgagactccatcaactagaatttggccacacttagctgtaaggcagagtggaaactaatccctgcttgggtggctgtgagtccagttaaaatttggggggtttaattagtagaaggaaggagagactagatgtggacgggcagttatcagaaattaaaggggtgataaagtaagcttgaaagcttctttgctttctagtgtgacagcttgttctgagcttatcttgtacatttttgcttcagacctgaaatcaggtcaggttccatgtattaggacgtggtatatggaaaccatagcatgggttttagaaaagggtgcattgccattgagttaatcatcattttcaggctttttcagtacagagctaggaaatatttttttctgaaagagaaaataggtcatgaatccatactactatttgcatttcacttttaaggtagatatttaaaatgttaaagaatgtgtttctgtcataaaaaccaaagtttgattcctggttctgcaacttattagaggtataatttttttgctcattttgagtttcagttttctcatctttacaatggggataataactacatctcatggttgtcatatgattaaatgagataagtgctcagaaatttttactgattttattattctctatcacaatacaaaaaggagagacccctaattcttcttacaggggttagagaagacttagagacacttgtgccatcagggaagattgaattttaaatgggatatggaggtttagtgagaagaaatacccaggtaagggacccagcagaggctgtgatctgcatttgtcaaggctggtgcataggattctattttgaccctttaaaaaaaaaacttttttcttatagtatttatcatagtgtgtaattaagtagtagtttgtgtgcttatttgcttactgtctgactgcctttctgtcccacagtgacaaggaaggactatcctgtctttctttttgattaccattataccttcagtacctgccacataatagtcacacagttgctgttcagaccctgaataaaattttgaagcatttataaatatcacgaaatttcgcatttgattatatacataaataattctgcacttatttcagtgttacctactgagggttgcctactagttgatctagtttcttccaagtcaataactttaattactctggagaattttgcacacttgatagcattagttctttatcaatttttattgaaagtaaatgaatgaatttgctggtgttccagtctgtttggatcagattctgagccacaatgtggatatactggtatgttgtgaaatgtgtgccaagtaatttattgttaacaagagtttaaagtacttcaggtatcccttataatgaaaccactctggtttttccattttattatgttgccttaagagggagagagctgcacatacaggttattctcccaagaattacctgtagtactcccatgggagagagagagctcacgtgtgcgcttgtgagcctcagcacctctgtgctgcatcttttgtgtccgcatggaaagattcagaatgagaattctcacctggatctttagggaagtattctgagaaaggaggcagcatggtacaatataagacactagatcctaagtcaaatggcatttgcattctagaaccttttcttgtttggctactaaatacatgacactcacattttgcatatgcttatttttgttgttgttattgtcccctttgttgaggtataatttatatataatgaaacagcaatttcaagtgtaaaacttcatgaattctgacaaatgttaagtaatgtatttaatactacaacaatagtataaaatatatgttactccaaagaaattttctcatttccctttgtagttcctatcaccctcccttgacaactgacctgctttctgtcactattgttttgtcttctctagaatttggaattatacagtggacacaaaaaattatacactgtatataatatgtggctggcttctttagcataatgctcttgagattcattcttgctgcatatgtcagtagattgtttctttttattgctgagccatattccattgtatggctatactacagtttgcttatccattcaccagagggaacatttgggttttttgaccattatgaataagctactgtgaacattggtatacaagtctttttgtagacctatgttttatttcttttgggtgtatacctacgagcataattggtgggtcatatgataagtatatatctagctttataagaaactgcaaaattgtttaccaaagtgtttgtactattttgtattccaaccaggaatgtatgagagtcctagttactctacgtctttccaacacttgaattttttcagtttttaaagttttattatctctttttggttttagtttgcatttcccaagtaactaaatatattgaaaatcttttcatgtgtttcttttcttttcttttttttttttgagatggagtctcactctgccacccagactggagtgcaacggcacgatctcagctcactgcaacctctgcctcctaggttcaaatgattctcctgcctcagcctcccgggtagctggggttacaggtgcccgccaccatgcccagctaatttgtgtatttttagtagagacgggtttcaccatgttggccaggctggtctcgaactcctgacctcaggtcatccaccctcctcagtttcccaaagtgctgtgattacaggcgtgagccactgcacctggcccatgtgcttgcttgcttatttatttatttatttatttatttatttatttatttatttttgagacaaagtctcactctgtcacccgggctggagtgcagtggcgcgatctcggctcactacaacctctgcctcccgggttcaagcaattctcgtgcctcagcctcccgagtagctaggattacgggcacccgccaccacacccagctaattttttttatttttagtagagacggggtttcactatgttggccaatctggtctcaaactcctgacctcaggtgatccacctgcctctgcctcccaaagtgctgggataacaggtgtgagtcatggtgcccagctccatgtgcttattttctatctgtatctctttggtcaagtgagcatcctgacctcttggctgttttttattggatagtctgtcttcttgctaatgagttataagaattttttacatattctggataggatacaagttctttattagatatatgtttttcaaatactttctcccagtctttagctgcctttttatattttagagtgtcttttgaagagtaaagttttatatttattttttctttttagtttgtgttttctgtgtcttatttaagagatcttttcctagtctgagatactaaggattttctcctgtattttctccaaggagctttatagtttgtgcccttactttgagagaaataattcatttagaatttctgtgtatgatgggaggaaagtgttgaggtttatttttgacatatggataattaattgtatcagcatttttattggagagattatcatttcctcattgctgaagcatctttattgagtcaattagccatgtttttgtgtggctgtttctggactttctattctgttttgttgataacctgtgtcttcggcaatacaacatggtgtcaactactgtggttttataacgagttttgaaatcatttagttaagtctccaactttgtttttatccaaattgctttgtttattctaggtcctttgagtttacatgtaaatttagaatcaggtttattagtttttataagaaagcttactgcaatttttattggaattacattgaatctataaatcagtttgagggaaaaatgacactttttaccttattggctattctgatccatgagcatggcatatttttcagatttaagtgtttgattttttcagcaatatttgtagttttcagatgggagtttatacatatgttgggtattttatatattttgatgttattattgattggtctttttactttcaacttctgatgatttgttgttagtacataaacagttgatttttttgcatctttacctggtatcctgtgacctttctaaattttcttgttacctagtagcttttctagattccttgaagctttttacgtacaaaatcatcttgtctgaatatagacaggtacacttcttcctttccaaatctgtctgccttttatttctttttcttgcttcaatgtactggtggaagtagtgagaatggacattgttgtcttgtcttgaaatctagaagcttaacattaatttgttaacattaacatttaattttaaggaacaccaattgttccttaaaattaaaaaaaatactacctatgatgaattagcattgtaacaaaaaaaatacaaataataaattacctaacctatatcagacagcacaaataaaggcagttgacattgccaaatttctgagaaaacaaataaaactatcaaagctatgagatggtatcataactgtttcactgactatgaaaaactgttactgaggaatctaatatctgtccaaagccaacatttaaaagataagtgttatattggctggtagtttgtaattgaaataagaatataaatattctcctagaaagtacgaatgaaatactcagagtctttagtataccttgaagttatactattattattattattattattattattattattattattattattattatttgagacggattctcactctgtcacccaggctggagtgcagtggtgcaatctcggctcactacaacctctgcctccactgtgcccagctgaaattacatttttcaaactcatggtgctaaaaaggtcaagatcattaagcacacgttataaaatatgaccctgatgctctgcttaacttctaatggccaaaaggaatttaattagtagacttagtctggggaaggcgtagactcaaactctgtgatactcaaatgctatggagctatgatatggaagaagaaagggatatgcagctgcctagataattttatgctatagttggaaaaatttttatgcacatttaatgttaaatttggggaagcaaagaaatatattaaagtgatgatacaccttagaatttaagttataggttttaggtttgttggaggattaaataagatgattaaagcaaggtaactcattgaaaccttgtcacattataagcattcagtaaatgatgaattatcagtctcttaacttgtgtgattatgggcaatatttggtgtggtcaaaaggtctttaagtttttttcctacttctttgagttatcaagaaagagattattattttttaatacaacctagtttcacaaatagggacatacataacatactacagaaggtttctgttgatgtttttgtgcttgaggcattaagtgctctcagttacctggaaaaataatggctctccaaaatgattcaaagcttttcctttataatttttaagattcctggccaatgtgctttaaatgaactttctgacttattaataaaactcaatgaccgggtgcagtggctcttgcctgtaatcccagcactttgggacaccaaggagggtggatcacctgaggtcaggagttcaagaccagcctggctaacatagtgaaaccccgtctctactaaaaatacaaaaagttagctgggcatggtggcaggcgcctgtaatcccagctactcgggaggctgaggaaggagaatcacttgaacctgggaggcagaggttgcagtgagtcgagattgcaccactgcactccagcctgggcaacaagagcgaaactccatttcaaaaaaaaaaaaaacccatctcaatggtttattctagtctaaatgttttatggtagattctgaataatttgggctattatttaacaattatctatagttacactttagcattgaaaatgttattgtacttttttttttttttttgagaccgagtctcactctgttgcccaggctggagtgcagtggcacgatcttggctcactgcaacctctgcctcttgggttcaagcgattctccagcctcagcctcccgagtagctgggattacaggcgtgtgccaccatgtctggctaatttttgtatttttagtacagacgagcttttgctgtgttggccagactggtctcaaactcctggcctcaagtcccaaattgctgggatttaggcatgaaccactatgcctggccataccgtacagaaacactcttatggtgtatgtatgcgtctatttggaacttagttttgtagtctttttttaaaatcatactttattatagtaccttgttatcattttgaatatgttaaatcaacactataatagttaaggtagacagaacattaggacataccgtattctatattttttcctctgtatttggtatcagtccctggatttttgcttttatgagtctgtttctttcattcctattatttttgttatcaatcatcctagtgcttttttaaatgattgtgttagctttctagcttgtcttggctgctttcagtctgtcctgcaggttgcaaaattattttaaagcataccacttgagtgtattactctactgttcacaatgtttcattgctttccattgtctactaggttgctcagtgcccttcacaacttagccagtcacattatttattcatccatccatgtattcattcagccatatttattaggttctatgaaccagacaggatggaggaatatgtgctatgagagcttataatgaattagatctggtcaaggaggtcattggagagccaagatctgaagagagtaggatttgttactcaaaaaatagaaaagaggattgtaccagacagagggactagcatgtacaaaggcttttttttttttcctctgaaaggaatatattttgagaatgaagaactgaaagaaggctactgtggcttagacacaggggtgtccaatcttttggcttcccaggggcacattggaaggaagaacaattgtcttgggccacacataaaatacactaacactaatgatagctgatgagctaaaaaaaaaaaaaaaatcacaaaaaaatctcataatgttttaagaaagtttacaaatttgtgttgggccacattcaaaaccatactgggctacatgcagcctgtggaccacgggttggacaagcttggcttagagcataaaagaagagggatcgtagtacaagatggaaaagaaggttggacttgaccatacagggggcttccagaccatgctgagtaatattattaatataaaagcaataagaagccatccaagggttttatttagaggtagggggtggaggagagggagataaaagtggtctccgttggagcattgttgtttagtcttgacaatagcttggtcaaggaggttggtgatggcagaagagtttcagtttcaagagatacttaggaggttaaatcagtaaaacctgctgacatataatgcagttgggggtgtaagaaacagggaggaggtgacgtaagaaacagggaggaggtggttatccattattcgataaatgatgccattttactgagttagggaatattggaagaggaccattttgggtagaggaaaatcttaagttcagttttgaacatgtttagtttgacataccctttgagccattcaggggggtgtgtcatgaggcagaatatttggtgctcagagagagatagaggctcaaaatacagtttttattatttgattattgataggaattgaagctgtgagtagtagggttgggggttgagactatacattgggcaagacctaagactgattcttgcggatctgcagcacttactagttaggtattggagattgtgtctaggttaggggtgaggatggaaggcagtagcagccagaggagagaaggaaaaccatgaaaatatttcagcatgaaagccaaaggaagattcctttcaaaagactgggaagtagttttgaatgctgcttggaagccagatttgaaaatctccaatggatttaatgactcaaggagagatctgctgctgtgtaacaagtcatcccaaaacttagtgacttaaaacaacagtttattatttcttaagaatttgtgagtttgttacataagccccaggcttatccaggactggaacgtacaagatggtcttatttatatgtctggggctttggtgctgccagttttctgggggaccttgcttctcatctctgtggcttctgtctccatcatttagtagcataattcaagcttttttacatggtagccagcttccatggaagtggaaataaggctgctaggcctagtaagacttagactctgaatacctttgagtgcttcggagtactgtgccatctaccagagtaaccaagccaaaacaaaacaaaaacccattgatgacttagtgtaagagttgtttatgaaaaaaaaattaacagtagggaaatccaagaattgataggctaagtataactccaaaagacagatacattgagaggactggggaacgaagaaaatttcctaattattcctctgcattttctttaagcttgacctcaactgggctgctgatttcctgaacacttcctctttctttcctcatgtactccttttccctggacgttatttctctatctccctatattaaaatccaacccatccttaaaggattaaaggctttcttaaaaatctttctctcctcctttgcactgtattctccaccagttctgaagtttaatttagttttcatcccagtatttattattattatttcttgtctcctatgtgtttgatcatgatcttcactcttcattactccctaacttgcatgaggttctggattctcagtaaacttattattcttcacacttgctcagatgctacttcctctgagaagtcttccctggtttgtcccctaatcatttattcttttgtactttatgcatatttttattgttgtacatatcataacacataattgtttacttacatgtttttgaaagtagaagattacaatgtgtaatgtgttgcctttcattaaataaatcctgagttatagcttgatttctgatccctattttaattttttttaaaagtccccacatgttgacaataaaatgtgtatatttatcatgacctaattatttctttgatactgtgctgagttcattggtactaggccactgcagtaaacggtaaagaaaagttatgatttggtatatgaagttaaaaattacaagaaataatatatggtcaagttttttatatctcttaataaggcaagaatgaatatatgaggttatgtttcatgtgggcctcagtggaagtatgtacatatgtaaattctcagtatacatcttatacattgagctggatggagtgtttgttatggtgccagcttatggaatatgtgtttttccacaccttgttcaaggtgtcaggtaggctttgcagctcatgtgtttgtattctctatgtatgggcacgtacaagggccatagagatgaactggttacacacacagggaaagaataagacttccagctcttggagataagactggttctgtgactcgtgacttacattagcatggaaactttgtatctatgtgtgttggggtggagggagcacagttttgttttttttttttttttagtttttgcttgtttgttttgtgatggagtctccctctgtcactcaggcaggagtgcagtggtgctatcatgactcactgcaatctcaacctcctgggctcaagctatccccctgctgcagcctcccaactagctgggactgcaggtgtgcatcaccacgcctgggttgtctctctctctctctctctctgtgtgtgtgtgtgtgtgtgtgtgtgtgtgtgtgtgtgtgtgtatttgtagagataggatctcactatgttgcccaggctggtctctaactcctggcctcatgcaatcctgcctgcctcagcctcccaaagtgctaggatgacaggtgtgaaccaccacatctggccaggagcacaatttttattggcaggacactgagaggtgcttgtgatctgattataactctagctttgcatctcttttactttgcttagaccgcatgagtggaacctcatttattatttcatatgacaaatactgtgggggaaacaaaagaatcagatccttctcctttcccttttccaaactcgtgggataggctgcgaagtaaataggtcattaaaacttaagtgggaagcatgattatgagaatacatataatttgaattactttgataatagaaccagttggcagaacttccaagttcaagaaaggggaaatctttttctttttttttttttcttttttttttcttttttttttttgaaatggagtctcactctgtcccccaggctggagtgcagtggtgcgatctgggctcactgcaacctccacctcctgggttcaagcgattcttctgcctcagccttctgagtagctgggactacgggcacgtgccaccacgcccggataattttttgtatttttagtagagatggggtttcactgtgttagccagaatggtctcgatctgctgacctcgtgatccgtgaccttgggctcccaaagtgctgggattacaggtgtgagccaccacacccagctaaggggaaatcttgtgttggtacagatcagtcctgactcatggtgggctcaggtttgatcctcatccagccaattaggttgtatgctaggagacatctgtttagattcctgagttgaagatgttttaaaaataaacttcttttatctttttttactgtttgttggtttctattttttacattctacagtttaaaaaataagtaataatgtatgagaattttggttatctgaggttttataatagcttttcttacaatgagctagctaaaaggtgatctcaaatcttgtttatttggcgtagtttatctacattaaatcctgaaatcgtgctgtgtttatggtaggtgctccatgaataactaaataattaaaatttaagttgagctttagtctaattttagaaaagtcacaaagaggaaattgcacttttataagtacataaaattgagcatacctggtgataactgtcacctgcctaatctgccatttgtttttcagaccaatggagaagtaggttttattctttttcttttggtaagaagttgaagatggactcaaaggtgaaggggcagtaaagtctccaagggaagctaggaaaaataggacagtcttcccaaatttaaattgaagttgcatttccttttctgttggctacgaagatgatgacgtaagatatttgggttggcgatattactaaaattaatcatttaaaataacaatatggaaaacctcacttgtattcaagcaaaaaataaactgaatgtaaacaataattttctctgcttattagtccattagactgaaactttgcccagtataattttataagattctaataaaggcccacaatatcatggttatgggaaaattactatattattgaatcacacatggtttattcagttcttaaaattgcagtcctccctccctagatgttccagacttgatgatatagcatgggttacttgagtgtgttctccaaacagatgtctcctaacatacaatcttatattacagttcatctctgaaaaggggataataatagtatctatcccatttgcttgttgtaaatactgtatgtaaagctcatggaatggtgcttggcacacagtaagtgttcagaatatgctagctattgttgtttattgttattgcccatgttttaagaaatggaagggaaaagcaagagggagaaaaatatattgccactcctttgtatgaagagtaactaggggaaaagcataggaccgtgcattataaaaataacctacagtgtttataagatgtattaattaaggacttaaaatcactagattgatacagaaattaatttaaattttttttctaaaagtagttatttttataattaaggttttcttttttcattgaatacaattagtttttttaatattaattcaacatttgattttttaaaaatgcagattatatttccactcctggttaggcagtataatacagtgtttaagagcacagtgtttaagagccagacttacctgggtttgaattctgtctcctcaccacttactgtgtaccttcagacaagtcctgaagctctctgtttgttgtttgtaaatgaggactataatagtgcctatctcatatgtttattttgtgggttaaatgaattaatatatataacgggtttagaataacttgcgccttctaatagtaaccactataaaagtattattgttattaatggctatattttttaaagcatcattagttcagacacttccatttgaatactcatactagagtttcttgggattaactctcagaaaacagctcttatgaaactcttatcccatccagtgttcagaaataaaaatcctattaaatatcttgttagctagtactgtgattctcagttttcttctttctgttaaatacagctctgaaacagattccttcaggaacatgatccttctgtttagaactcttaaagtactgggtgtattttattatttatctttaaatcctcagagcctaaacatacctaatatttggtaggtacataaaaaatgatgagtgaatgcatatatagttttcaggaagtagtctaccttcttgcagtgtattttaatggctgatcaagaataactctttgttaggggtccttacaaatgtctgagctttggagttagtaattactgtacttaatctttctcttgttcagttgaggcatataggaagttttcttgtctttggttttgtataaaataatgacattattggaaaagaggtacagataactacttgaataatttactggcttttgacaattatcttcatattaatatgtttcagtactttggataagaataaggaatataaaagtttctgccatatttgccttgttctttttgttttggattttaaaaaatttaataagtgaaacagaacattgcagattgatagtgtgtagtctcccttgttcccctactcagtgtcactttcctccctctttcccttcccgtaatcaacaattgcaaatttgatttatagtcatttagtccacattttcttatttttactacacatatctaaaactattctaaacattgtttacttttaacaatgtgtagagatgctattctgtgcatcattttgcatcttgcctttttttccttccatgtaatactgtttttgacacagaaatagactaccacgtgtacagtcacccgatataagaaagaggtgacattctagtgcagcatagaaaggatggcctgtatcaattggatatccatttgggaaaaaaaatgtatctttgcccctattttggaccatactccaaactcaatttcagatgtatttcaggtttgattttaagtgggaaaataataagcttttagaagaaaacatgggagagcatcttcattatctatgaggaaacaaaaagcactaactgtgaaaggaaaaatatatttagataacttctgtttatcaaaagataccactaaaataatggaagaggtaacagagtagaagatatttgcaatactataatgtatccaataaagcagctgtccccaacctttttggcaccagggactggtttcctggaagaaagacagttcttctgtggacatgggtgggtatggttttggaatgaaactgttccacctcagattatcaggcattatttagattctcaaataaggagcgcacaacctagattccttgcatgtgcagttcacaatagggttcatgctcctatgagaatctaatgccactgctgatctgacaggaggtggagctcaggcagtaatgcttgcttgcccactgctcacttcctgctgtgtggccccattccttaacaggccacagacttggggatccctgcaataaaagacatctggaatagattaacaatcctccaaatcaataagagaaagctagacaacccaattaaaaataataagcagaagactttaatagtcacttcacaaaagagcacgttgaaatggccaataagcgtatgaaaaggtattccacttccataaacatcagggaaattaaaaccccaccccactacacacacgcacacacacgcacacacacacacacccacaatggctaacatgaaaaagacagccaaaactaagtgttgatgaaggagatacagagcaactggttctgttatacgctgctagtaggagtataaattggtataaccactttggaaaactggcagtatctgatgaaagtaaacatattcatatccagcaattccacaactaggtatatactcaacagaaatgcatacatatattttccacaaatacatgtactgtaatttcatagttacactattcataacatacccaaacaattcaaaaggataattacggagtttgaggccagactggtgaagatcccttctctacaaaatattaaaaagtgagctgagtgtggtggcacgtgcctgtagtcctacctacttgggaggctgaggcaggaagatctcttgagtctaggagtttgagggtgcagtgaactatgaccatgtgactgcattccagcctgggtgacagaacaagagcttgtctctaaaaaataaaactaattatgatatacagataaacaatatggcaataggaatgaacgatctaccattgtatgtagcagtataggtgattcttacctttacaatgatgaaagaagccataaaccaaagagacaatactccatttttataaagttcaaaatcaggcaaaactagtcagttggggaggggcataagttagtaaagttatctttcttgatacaaattttagttacacaaaggcattcaacttgtgaaaatttgttaggctgtgctttctggatatatgttcttatatgtatgtatgttatattacccaaaaaacattgttttgagatctatccatgttggatgttaagagttctagtttattcatttcagatgtggtgtgtgaacagactgcagcttatttattgattcccttattggacttctaaattgtttcccgttttcctctgtttcaaataatgctgtagtcaattgcttttttttttttttttaaacatcttatacaaataatatgagagttcttctaggagttggcattgttgagttttagggtatgctcatgtttagctttatcagatactatccaattgttctccaaatggtagtataattataggctcaccagaagtattggagagttcctattgctttatattcttgtcatcacttggtattgtcaaatttaaaaaatttttgctaatcttattgtgaaatgatatcaatattttaatttgtgttatctgttaactagtgtatttcatcatcttcctacatgtttataggtcatatggatttccttttaggtatccttatctattgcccattttttgcttttgggaattgtctatttttattgcatatttttctagtgactaactttatatttttcttcatttatgtgcaattttccttgattctcaaagtccatatattcaggaagacctccccaccccctttgatttttaagacattactggaatttcacctgtaaactttaaacctggagtaagtcaatcctcctgagatttttccttcagattttaatctttttcctgtttctatttgcctgccattactccttattttactaattcatttaaactatagcggattttccccttttttggttttgggaggttggtggtgatttgcagagggagaaatgagaagcaatagaaaaataaataaaaatttgcctaaagtttataaaattgatatagctatgtgtaaaatgcttagaatatgcttgtgaaccttgctggggttttttttttacatttgaaattcattctagattcagcattgtacagccaaaggccatttatttcattttatattgtctgcgttgcagatgctcatcattacatgattagtttgtgtgtgtgcatgtgtgtgtgtgtgtgtggtccgcgcagtgcctgttttcccccacattctcaagacagttccatgtatctatccattattctgcaaagcaactgcattaacagttgaaacttcacgcagtaccactggtgctttgacatttttgtgatattagagagaaaatgaccaagtacttggtagctgtgtttcccaaatactttaaaggtggtttaaagggtaaaaggagatgatgtaagtagtgcttgcttatttatcttctgtcagggtgtggtaatagcagcaagggcctggagctcctgagctgtttacaattgtcacagagcctgtgaggctgggaaaccttcctcgagaatatgctggcccagatttcttcagcattccttctctgttgcttctgccttctgccttacgtgccagagaaagaactcatgacttctgtccagagtcacaaaatcttggctgatcttgatgaaggagtcttgcagcatattctcatggcatgaatcttttgaagagaggtgccagtataacatagcttcactaggaaaactcttcctagaatagaattggatttctttttttaatggtttgatgtaagtcaatgaagaaacttgagtctattttagtgtagaatgacttcaacccccatcaagtttggaagtcttctctgtgtgagatttagaaaggctgtacacaatacaattaggtcttgctttgtgaagaaattagtataaaaaatgacaattaatttagaagtgatcattttaaagcatgttttgtataaaaatatactccagtatttgtagaaaaaagccctaaactgagtcttgattttatttttaaaaaatttgtaagtggtaaggattttggttttcctaagcaccatatacttaaataccattatcacacttaaaagagtattaacaattccagtaatataatcttgaaatttcctgattgtctcaaaaatcttcgcttttgcctcttttataacagttttaactcctcagattcccttccctttgcttttttatgccactgatttattggagaaaccaggtcatttgtcctgtataatgttccacattctggatttgactgattgctctcttgtgctggtgtttaacttgatcctatatccccactattccctgcaaactggtagttagaaccgaaggcttgattcaattcaggtcgaatcttttctttcttcctcttttttttggtaagaatcctttatagttgatgttgtggtattgcatcatgtcatgagaaacatagtgtctggtcatcctcattgagtgatactgagatgaatatgtggattctgtttgtacactgttactctgttggtatagaagggcccattatagtcatttaaaactttttaagatgcttaagaatctcagaaaagattctaacttagcaggtgtaagggaagaaacatctattattaataaaacatgcaacacatacaaaaacccccaaacctctctacatttactcagatgtggtaagaatcactacatttaaaatgtaattagagtgacaaaaatttactcttctacaaatgctttgagattgtttatcttatataaaatgaagcatattttaaaatattaagagctgtaaagatgtttgagattgctgtggtgtaataaaaaagtactgactctggacacaggaggccaaatcatttttttgaggtctatttttttttacatttagaaaataataagaccgggcatggtggctcacacctgtaatccagcactttgagaggccgaggcgtgtgggtcacctgagatcgggagtttgagaccatcctggtcaacatggcaaaactctgtctctactaaaaatacaaaaattagctgggcgtggtgttgcgtacctgtaatcccagctactcgggaggctgaggcaggagaattgcttgaacccaggaggcagaggttgcaatgagccaagatcgtgcctctgcactgcaacctcaaaaagaaaagaaaagaaaagaaaaataacatatctatcacagggttgttttaatgattaaatgaaattatttatttggaagcaattcagcacccagtaattaattgagtctaaatctgaaattcattccaacaatacagatttttttcagtctatatcttcaaagtaagtttaagaaaattaaacagtatcatgtgctgttttagctatgtctgaacaagtaagcttttatatttgagcttgtttttcaagtgataggagagttgatgcagttctaacgtaagtgtaattaaagtaggctttttgaaaaaatagtctgtggaattcttattactgtttttcccccctactttcagcttcatttacctcttaattctcctttgcctggaagtgaattgaccaaggaaccttttcgttgggatcagagactctttgcattagtgttgcggttgcctggcaccatgtcagtagaatcagaacagttgacaggtgtgcctttagatgactctgcaatcacaccaatgtgtgaagtgacaggcggtaagttttttgctggcagtaatttggtaacttaaagcagattttatctgaatgttttaaaagtgtacattcaaaagctccatgtttgtttttatttcacaagttaatattaggaattaggcatatatgcttttaatagtacatttattgctaatggtctatgatcttcatttgaatagaatgtgggttactattggacatgacaaggaatggtaatattttttctacttgtatagaaaatgctattatttgaagttgttaaactaattttcttatctacaaagattgccaatgatttagaagtaccatagcattattttttgcaaaaacagtcttgagaatcatctctgtgtatttgatgaggtatgcttggttaagtgcaatttttcccagaggcaaagagattgatagattaaaggaaacagatagtgaggtcttatccagcttctgtttcacttatacatcagattaggtaggtactatgccaagtgaacatcaaggaaaatcttgaaatacaatatgtaatcaactcagaactcatttaatatagaattggctaacaggtggattaatttcatataggtatgtattgcgtgcctactgtgtaccaagtatcgttccatgcttttggcattcagtagtcagtacagacacggcatttttggtttcatggagcatttcagttctcacctgagaattgtattaaaataattttaatatcaaattctgtatttgatattaaaatgtgcaagtctagcattccactattttacttatgataagggcctgtgacataatctgcagacacagttggtgcgctaatgagattcgtcatagccagctacataagagaaaatgtaagttctaattaatattttaggtgcattttttctaaaattctatggattttggaaatctgcaaaattcacagacaaaaagggattaaccttacacaggtgtgtgaaatagatagaaagctgttattcatgtcattaaatgctttcattttatagaaatgctttttgtgaactttcgtaatgccttcacaatttaattaacaaagggtaaaaaaggcatatatgtaattttttttagggataacctgtcatctacatttgaaaattaatgaacaattctcgttacatagataatatttttcagtgacagtcgtatttttttctgtgggagggtgcacatttatattcatgaaattttagtttccagctttgaactggcacccttgttaaaaattctgatttttttttttttttaaactctggggattttacttaacaggttctgaaaggcttggaggctataacattctcacattggaaattccttactaggaattacttagtttgaacttagaatgatgatgaacttttgggacttaaatatactataacttttgtcactaggatcaggaatattcagagtgtgaagtcaagtgagtggtgtaatcaaagagtctgaaaagaaccatgagacatcatgtagcagtcttgcctttaggcagtaatgtattaaagctactttgcttattctttgaaaggaacatctctagagaagttccaaagtcatccttggtgatatctttcaatgatgcagaaatcttagtcaagaaattaggaagtcttccctaaatatacattctgaatccttcctgatgtgatagtttatttgccccttttcatgctcttactagcaataagagtaagccgctcaaatgtcactcatcttttcatatctctgaataatgtgtttcctttcttttttaatttaaaggatgttcactaaacaaagttttggggaacaccagaaaagtagaaagaacaaaaaagataatacccactggtattgcactatccaaatatgtaatcactgctaacaattcctgtgcatttttaaaacttaaggttggccgggcgcggtggctcatgcctgtaatcccagcactttcgaaggccaaggtgggcggattacctgaggtcaggagtttgagaccagcctggccaacatggtgaaaccccgtctctactaaaaatacaaaaattagctgggcgtgatggcacacgcctgtaatcccagctgttcgggaggctgaggcaggagaattgcttgagcgcaggaggtggaagttgcagtgagctgagatcgtaccactgcactccagcctggctgacagagagagactctgtctcacaaaaaaaaaaaaaaaaaaatttagttgtttatgtgtgtatttgtgtacatttatttttcccattatggagtaattcatgttcactaaggaaatgttggaaaaaattcatctgtattgccaaaataataatatatttctttctatgtatttttttaattgcataattgtagtcattgtaagcatttttcttttgatatcaggtaattaatgagtgcccactctatgccaaataactgttactgggtgttgggagtacagcaggaacaatagaaagcttatgtctttgtactgagtgacagataataatcatggaaaataaataaatgatattttatagtagtactacctactactattgtagtagatagtagggtgctacctactatgaagacaaaacagagtaagggagtggagactaacttaaggcagagaaagcatattctacctaagttttcgtctgaggaggtaacatttaagcagagacctgaataatggagttaattacacaaatatctaggcagaggaaatggcaaggaaagggacatgctctctatatatttggaagcaacaggaaggctagcatggctggagcttacatagggaggaatagagtaatagctaggtttagagaggtaggcaggggccaaatattgaatggctctttaggctacaataaatattttttgaggaaatggcaaggaaagggacatgctctctatatgtttggaagcaacaggaaggctggcatggctggagcttacatagcggggaatagagtaatagctaggtttagagggtaggcagaggccaaatattgaatggctctttaggctacaataaatatatttttatattccaagtatgatgtgaagccttttgaaggctttttacgggaggtgacgtctgatttctatttctgaaataccacttcacctgttagatgagaatatagagtggcaagaatgaaagcaggaagactagtagtagtactttgttctatgctagctttggaggtcctgagaggtggcttaatgcaaaagagaaccaaggatgaggacaataagggaagaagcaatccaggatggttcccagatgattcagttggtccgaaccactagagatggatggctgtgccaaggactgagatggtacactggggagaagcaggtttaggggaggtgcaaggatgatagcaaattttaaaatgtgtaatagacatgttgttaaatatatcaagaattttttaagtattttataaaaattatagatatttctagattaaatacatttaactttcttagcctctgtaaggactattgaccaacttagaaatgttcatttgcttcttctctatttgacaaagatgctaatactgcctttagactcactatatttagtttgacttttttgtggactctacataacccaaagtgagacagcttcttgacttgaaggtgtgtgctaataaaacttttttcacaaatacaagtagtgatcctagaaactttatgcattagcacaaagtgttgtatatcccaaggagtaagttttgacatagacaataagtacacatgaggaacattacggaggatataggctcactttgtaaagaaagcaaaatttgctatttctgtttaacttttaaaataattaatagatttttattaccaaatgactcattttattctttttctccaatttttgtaaaatatactgattagtaattttatttcgtgttaagattgatttgcttatgttttcttaattgatgacacaacttaggagagcaagataattgtcatagtttatatactttaaaatttttgctttttaatgacatcttaggaatatgcttaaatttcatgaaataagatactcaacctttatgtaaacttctaatattttgcatgtaaagatggttagcctttttatggattgctttttgtatatacttaaattgacttagaaaaaaatttgaatttaccaattctttcaagtaagcatgacttcatatagatgctgtattttaagtactgatttcaaattcacagaggatttccaagggacaaaggatatccagaatagtttctgatacactgtaagggtttgaattgtaactctatcactatactaacttggaaaagttagttagcctctctgtgccttagtgttctcatttgtaaaatggggaaaataacccatacaattgttgctgagattaaagaaattaataatcataaaatgattggaacagtgccaggcacgtagatactcagtaattggtagatatttgttaaggttataatcatcattattttatacagttaagttgttgtatttattttttctaagtaaagctgactttgaggatttgaatcaccattgtctataatgttctcttttctgagtagcctttaacaaatcacgttaagtgtaagttgatataagtaatttgatgtgtcaaatgtaatgatgtagcttgtgttgtgaaataattggttgaatgtgtaaaagagtagggcatcatattgagcttattacaaataatgttgcaaaatatttggccaaagattgagttttagctgtcaaggtttttagtgttggtctggatcagaactgtataatagaaatctgattcaaatttcatatgtaataaaaaatttcatagtagccactttaaaaattaaaaatagatgaaattaattttaataatatattttatttaaatcaatatatccttattacttcagtgtgagattgatattttaaaattactaatgagatgttttatattttttcatactaagtcaacaaaatcaggtgtatattttacttactatacatttcaattcagactagctatatttcaagttctcaatagctacatgtgtctagtatataaagtattgtatagcaaaggtctagatatttttgttgaaaattcctctttaaaagatcttttcactggtatctttttaaaaaaatcactagtatttaatgcttctgaaccaaaagtagtataagttaaaacgtacaaaaggggaattcacgtgagacaggtaattcccaagtgtttacataagctaagtgaaattcagaaaagcacacgctaccatctgtatattaaaatgcaaatatttaaaatacttaaaaactgccagtaaacaagtagttattacatacctactatgtgcacagtaaatcttagtgataatacttttgttaagcaggaataagattttggggagacagttactagatgtgtgtgtgtatatgtgttaaagataaattgtattgcataacagttggagatagtgttttttatatatatgttttaaaaaacataaaatatgtgacttgttttcatgtgttttgttcagaccaagaattctatgttccaaatacctgtaattagaagaaaaaatgtacatactctcacaaaatgggattgttggttggttggaaataatgatttttgtgcattctttcataagataatgaaattagtcaacttttaccattgaacttttgttaattagtactgtcagaaaccccacagttgtttttttcttgctaatgataggaattcttgcaactaactagtttactatattcttcttcttcttcttcttcttttttttaatctcaggccgttcatattctgtgtgttctccaagaatgcttaatcagtgtctggagtccttggtgcagaaagtacaaagtggggtggtaataaactttgaaaaagcaggaccagatccttcccctgtagaaggtattattgcacttttcttttagacattcaaaacttgctttattgtttattcaactagaactgaaaacttactgtgatttggccttaagataggcaaggccaaattattaagacagaaaggctgttggtaaagagggaagattaaataggaaagtcaaggtaaactaatagtagtctagtagcatcacctttttgtattaatgattgtctattgcctgacattttgatgagtcaaaagccttttcaaagatttatcgataagcaactttataatttctttgtagtattatacaattgcctctcaacatatatatgcttctcctatgccctttaattcccaaagtgttcagtcctagatgtttaactccttagctacttttgtaccagggatcaaactgattgaaagtaaatggtttattgtgggtcaaaaatgaggaaccaggctttgccattaagcttgattcttctaactctagctgagtcccacctggctttttcttggcttctgtaatcatgaactatttccaatagccagtggatataaggagttatagtagaaccaatggatggtttatagttgagaccctctgcattgtatgttacctatttcaagatttaagagtcattgctgggcacggtggctcacacctctaatcctagcactttgggaggccaaggtgggtggatcacctgaggttgggagtttgagaccagcctgaccaacacggagaaactccgtgtctactaaaaatacaaaatgagccaggcgtggtggcgcatgcctatgatcccagctactcgggaggctgaggcaggagaactgcttgaacccgggaggtggaggttgcggtgagtggagatcacaccattgcactccagcctgggcaacaagagtgaaactccatctcaaaaaaaaagaaaaacaaaaacaaaaacaaaaaaaaacaaaacacacacacacacaaagatttagagaatcatttaatgataattggcagaggtggtccactaaagtaggtacctgggagaagagaaagatcatagagatgaaagaatgggggcactgagagggtactatagggaaggaatgggtgataacaataagttgtgtcatgtctgctttaacgaaaccaaacttaaaaaaattttaattgttacagtgtatttattttaaattattttaatgctttgtttagagtttgttactagtaaatgtttactggattgttgaagatagttgctgttttgctaaaattattttagattaaaggtaggtgctttggtctagatttgcttattaagttctttttttaggcttcggttaaaatgatttctaagaaatactcaatttgcagtacttatttattctagtatttattgtgtgcctggcactgtttttgacatttgggatatgatgataaaggtggcaaattgggtgcttgctcttatcatctgatgaagaaaacatgccattcatcaaacagatattcaccgtaaagtatgttttgtgtgttccagttgggaaggcaaaggatgctgcggacctcctttgaactggcgaactcatagttggaatttgtacttattgtctaatgaattacaatctagtctaaatattcagcagacatagtgttctgccatttaagaaaaataggaaaacctggaaaaagatattaggaattttttattaatttaagtaataattgatataatttaactttttatgcttatccccccttatgatatatgctttctttgtcttaatttctttgctatagatgggcagccagatatatcaaggccttttggatctcagccttggcatagctgtcacaaactcatatatgtcagaccaaatcctaaaactggggttcctataggtcattggcctgttccagagtctttttggccagatcaaaattcgccaacactagtaagtaccagagactgtaactatgtaatagtaaccattcagctgtctttcctattagtttcaaattctgttgtcaaagctgtgattaatttatggggattagacagatgttcaaagtgctatgataccctgttacttgctttattatgttgctttgctatgataaccctgttactttgtttattatgaagtaatagaaaaaaggcatctccttcgtttagaatctaatactatgcttgcgatttttattcttggcttctgggttcaaaatttcctctttagactctaaatgaggatttgtctctgggacacaatttaggatttaaatgaaggcttagaaaataattttgatagtttgcctgcaattttttaggacttagtcttaaattcatattgatatgtatggttttagttatatacagtgttgcagattggaggtttaagctagaacagattttctgattttgtttacctgaattatttttaggaaaaatgaagtttgctgagcgatcatggtgaattatcagtattcattatataattcttaaaataatagggtacatttatacaaattaatatccatttagtcgtgttagtgtactctttttttccatattttttttctaagtatctgagggcattaagggatattttgtgggagagcatggcagtggttctccttgattttacctttagaaaataagaattgtatttcagagatcattaagcagtctaataatgtttgatacaacaaaacctttttgaaaccttttgtacttcaaacctgtatcagcttttcaggataatttttattttgagtttataaagtgatatttcctttattcattagggatttaataaagtagtgcatgaagttaaggttttctaaatttcattgaagtatcttcattataccttttctttttttctgatagaaccatcatagttttttagtctggctttatggagaaacttccaatttctttggtcattttactttcttttctggagctctttcaactcttacagaacagataccgtatttgtatgaaatattgtcatgttggttatttattctatttatttaacatgtacaggagaacatacagtacctgagttgtaatggaaagaaatccaaaaccagtatcagaacccttatctattaatgctgctctagcagtctatcacaaattcttagaagccatagagggtaggtaggacttcaattggagaaggaaatagtatgagaaaaaaaatatggaagtgaaaaagaacaaggtatgtttagaggagtaacaagtagctgagtacgggtggatcataacatgtatataggacattgagagtactattaaactaaccaaattgcttatgactttaaatgcagggttaaggaatattagcttttaaacagtggagttcaaagagcagtcgaagatgtttttaacagacatctttagaaaaattgatttggtggtggttatatgcagtaaaattagaaggggagatgagttgaaaggcaggtaggttacctatgagggctattgatatggttcacgtaagagattttaagtggttgaattatgatgatggaagagagaataataaataatattggaaagaactggcaaactttagtaactgaaggatattaggggaagtgaaatttttataaattacaatattgaagaaatattgctactgaagttaagtgtaatttacaagatgtgaatttgaatcacggcactattagttattaattagtacctttggttatcttttgtaagcttcaatttcccatctgttaagtggcttatagctccatctcatagggttgttttgggaattaaacaaaatcatatatgcaaaattttcttggccaagttctagaggatctttccctccactttccctcttggatctccgtatttttattcacagaataagtgtgttttgtggactgattcaataaactgtgtgtcaggtgcatgctaggcacaggagcacaagatgagtaaaacagtgcttcccctctgaacattacccatctatgggcatgtcagacacgtacacatcatagagtacagtgtgccaactgtaatggaggggtggggcagagccagaggaggtgggcctgacagcctggtgtgtttttggagtacagagtgggaaggggtatgagggaagaggtcttttagaggttgttacatgccaactcatttttctaaactttgtttgcaatatgcaagggagaaaataagtacttggcatggctgaagtatggagtctgtatggcgtggtggtgggaaggcagatagggaccagatcactgaagatctttatatgtgatattaagtgtctagaccctatttttaggtgattggctgttacttttaccgaacagttttagatagggaaattatatgatcctatttatatttcactgccatggattgatcagacagggactgattagaaactaaacaaagcaaaaagcatttgtactagtctaatctgagaaatgatgaaggcccaaattaaagtggtaagaaatagaagataacatttctagagagatgagagtttagtattgacagaaggcagcaactagtaatgactacctaccatgtttatgtgttctggtaagtgccttagaatttgtgatatcagtttatccaggtctttgtgacagttaaatatggaggatgaggggaagatatcaagaataacggctaggtttttagaacaggttttgtagcttgggggagaagaaacaaattgtacatattgtgtctgaggaacctgtggaagattcaggttatgtctagtgggtagttagatacagcagagaaataggagccatctggccccaacagtagatttgtgaaccaccagggtataagcagtaactgaggccaatagagtcctttatagctatgacatttaaaattatttcctcatagctcattttgttcacaatttgtgagatttttaggaagaggactattaagaggtagattggggagtaacatgcctttttaaaaaaagtattacttttttatacctctagaacaggggtttctaaaataagggtgtgtatcctatagagtttaccaaaatgattgctggaatagggaaggaaacattagaagttctatttatggttatttttctcctattttcataccattttggtatatattttgttatgtacatctacatttataatttgtataattagaaatatatagtgtgttcaaaaactgatcaagatctatgattactttggaagtcgctactctctataagtaattgctacaaatgaagacttgtgagagtttctatatacatttctaattttttggatgtaaaaattaatgaatactcaattactaaattttgcgtaagacctaaaaatattttcatttctatagattttcaagtgtttatctttttgttgtgaatattacataactttagcattacattttcaagtgtttcctttcagcttaatgttgcttttagcagtaaatcaaactcttactagcaagacggaggaactgagtaaattttgataatgaggaatatttagttttgtttctgaaatttcatgtaagtagtaattacaagactttcccctttagccacctcgtacatctcatcctgtagtgaagttttcctgtacagactgtgaaccaatggttattgataaacttccttttgacaaatatgagttggaaccttcaccactgactcaatttatcctggaaaggaaatctcctcaaacatgttggcaggtaagctgaacaacttacagtgaccccaaaatttaaatgaggcatttcttaaaaagctgaattgaatcaatggtttatgtaacattctttaaaggttattaaagttttaaccgctcctttttaacaggtgtacgtgagcaatagtgcaaaatacagtgaacttggtcatccttttggttacttgaaagccagtacagcactgaactgtgtcaacttatttgtgatgccttacaattatccagtccttcttcccctcttaggtaagtcattcttgtcactttctccttggcttagcatataaaagttctcctaaagcgcatttctttgtagtttttcttgtcttctggaaatcaatgaaaatattttgaatattctaaaatgttgaacatctttaagaaaatataacaatctgttcgtgtttacagtaaattaaaagatgatattgaaacactttttagtctgcaatttaataaaggtatttttttttgcgggggggtgggggagggaggggacggagtctcgctctgtcacccaggctggagtgcagtggcgtattctcagctcactgcaacctccgtctcccaggttcaagcgattctcctgcctcagcctccctcccaagtagctgggactacaggcatacaccatcatgcctagctaagttttttatttttagtagagacagggtttcaccatgttgaccaggctggtcttgaactcctgatctcaggtgatccgcccgccttggcctcccaaagtgctgggattacaggcatgggccactgtgcccggccaaagatattacattttaaattttttaattaaatattctaacttttctgcaagttagatttctaacagttagaattggtaatgtaggctttctgtttgaaatgagacattttgtagaaacatagtatagttaacaagatctgagtgcattttctaagaatttatctacactttaattttcatttggcaaatattttttaaataaaggaatttgttccaaaataatttgataaaagcctaaagttagtttctgggtacaatctagctatcatttttgaggagtgctgttggagaaaacttaccttccatgaaatcacattaaatttaaaagttatagtcaaaatattagtacgtatattttatagaaaacattgtgcatgctttgtttctgtcttcaaatctgctttgtgtctaggtctagggagggcatagattttccttgtgtgttttctgattctaacttaattcctgcatgtacttttagaccataattggcatcttttcattttatagaaaatgacaaaaccgtaaatcttactttcatgttaaaaaacgtctgatgttactctctcaaaaataacaaagcagactttaaaaaggaaacgtctttgacttgacttctatgtgtgaaaataatgagtagtgatagtttgttcacattatacgtttctagatgacttgtttaaagtgcataaagcaaaaccaacattgaagtggagacagtcatttgaaagttatttgaagacaatgcctccctactatcttggggtaagaatattatttaaaagaacttgttggccgggcgcagtgactcacgcctgtaatcccagcactttgggaggccgaggcgggtggatcatgaggtcaggagatcaagaccagcctggccaacatggtgaaaccccgtttctactaaaaatacaaaaattagctgggcgtggtggcgggcgcctgtaatcccagctactcgggaggctgaggcaggagaatcgcttgaaaccggaaggcagaggttgcaatgagccaagattgtgccactgcactccatccagcctgggcaacaagagcgaaacaccgtctccaaaaaaaaaaaaacaaaaaacttgttaattatattatgcttatggtttattgtgggtattataaacttttatttattgcttttatagattaaatgacatgaaaattgagcatacagatgaccactataggtataaaggtaaagagaggtttcagtgatttgcagagtagtgatgatgatcatgatcatgagaacatttatgtactgcttacgtaggccaggtactgtcctaagcaacatcattaatttatacagttaccctatgaggtagaaatgattattggttctgttacatagatgaggaaactaaggcattaaaaattaaataatttgcacaaggctacatagctaatatgtgaggggatgaggagcctgaaattcagtctggcttagatttaggcttttaacctcgagtgttgtactaccttttaaaattacagttttatgattatagttgtctctcagtatctgtgagggattggctccaggctcacctgtggacaccaaaagtcacagatgctcaagtccctcatataaaatggcatagtatttgcatataacctacacacattctcttgtatactttaaaccatttctaggttacttaatatgtatatacttttatactgtattgtttaaggaataatgtcaaggaaaaaagagtctgtatatatgttcagtacagatgcaacgatccatttttttttcctaacgttttcagtctgtggttgattgaattcacagaatacggaatccatagatatgtagggccgactatatttatttttaagggtgcacaatagtttttgttgtattatttcccaaatctctagaaacactttgtaaggtggataagtgtatattcttatagaaccatatgctttagaggacttgattacttcaaaatagtgtatcatagtaggtaaaaccaataatgtgcattttattaaatacatgatttagtttgtgaaagataactttttaacaaaagtacttaaaatcacttatgtattctgttttgatgcaggaatattatagcatttggctataaataatctttctaaatcatccctaatataattaggagattaatttcttgagctttaaaaatcatgacattttatagttctaacagataagttgtgttgaatgtctagcacacagtgcctggcaagtagaaggacaaaaaagaacaaacacttcgaacaggaactgttacatatgttgactcatttacgtttcatagcaaccctgaagatttagccaagccagataggtgttaaatatcagggctgggatttgatttcagtttgacaccagtgcttatacactttctaatatgtcaatgattatcatcctttttctggctctatccgattcacaaatgctagacactcttgctagtgatatttttcatcgtataaagtacttctcagtctctccttacaattgaaagttttttttaactttcaactaccacatccataataaatattagattgttttttcctcctgcttatgtttccttcagagctttttttcagctcagcatatgataataatagtaatgattaataatttgtacccaatggttttataaagtgctttatgtgtattaactcatttaatcccatgacaaccctgtaagagtaggtattgttattatccccattttacaaatgagaaactaagccacagagagccagagagcttatttataatctgatctagaatcatataactagtgagtggttgagcagctaattactcaaaagtagaaatcttgcattttccttgagtgtttttcacttactacccatgttttatcagagctacctctagaatgtgtcttctgtccatttattccaaacctagtttctcccagtggtaccaaggaagaccagtatcttatccttcttgtcttggggagttattatggcctctaatcctttttaactacttcaaacggcctttcatcccactgacaaacattttactgaaacataaatacgattgtgttacttccttattgaggaaaagaaggggaaataattttttggagaaaattttaagacagactatacatggaaccataagtttttaataagcttaatattgaatgatgttttcttttttcctatagcccttgaagaaagctgttaggatgatgggagcacctaacctaatagcagacagtatggaatatggacttagttacagtgtcatttcatacctcaaaaaactgagtcaacaggtaatatcaagaaatagagtgagccattaagtattttgaatggttttggctaggatggttaaacaggttaaaagctagttcttgatggttctaatggaattccattatattaatatattacattttagagccatatattacataattctgtctcacatccatggtgtgctatgttttgaaacattaatttgaaaattatataataattcctaatttatgaaaatggcttcatgagtgtggtcctagacttgctatatgtgaacattatttatcttttgagaaatttagattagaaagtcatttttccttaaaaaagaaaaaaaaaactctttatgttttgaaacctgcagatttttctttcagaatgggagtttctttgaaatgtttgtagaaaacactgaattttgtcattctggccataagtcacattaataaatactatagtagtcaagcagtatatagtttaactgactgtgaaattattaatgtcctatgaaatacattatttctccagtacttctgacattgctaccttaactacaaatcaaaaggcagtttgggaggagtcaaaacattgcttcttgctttccagggaagaactgcataattatttgccatattgatgtgctagtaaaaatgtcttacataatgatgattttaaaaaaataatttaccgtcacccctgaattgggaatacacatttttgtttagtgtgcatttatatttcatggtttaggtatagtgggtattaataaataaaataataaattgaaattgtgtttgtcctgctccaaaagtttagagttgtaatgatttaaaatcataagacattgttgtttaaactatgtttaatttacccaatacttgacataaactatgctacttgagtttttaacttcttatatacttaaaaaatatatatttaatttatagaagatcataaccattagtatctgatttattaatttagattttatcaagataattctgacttatttttactttaggccaaaatagaatctgatcgagtcattggatctgtaggcaaaaaagtagtacaggagactggaataaaagtccggagccgatcacatggtttatcaatggcatataggaaagattttcaacaactcctccagggaatttcagaggatgtccctcacagactgctagaccttaatatgaaggaatacactgggttccaagttgctttgctgaataaggtaataatcatgaatttagtgctactctagttatgttctgttatgttactggataaatcacattttctgttaactctgacattcagtttatccagactttaaagagtacttctgtactcttgtagactaatgatcattatactgtcactgctagaattaaaacagtgtacatggtgtgtgaatgaatggatagattgatgaagagtaaactaacttgtttattttatagatgagaaaacagaggtttagaaattgctttaagttgcagtagtggatggtagaattcactatagttttgtacttaaactgatgaccctattagacccacagcatgatccaaaaatgctttgtgagtactcatggttacagatatctttatcccagcagcctttttgtagaaataggcaagctgattctaaaatttatatggaaatgtaaaggtcctggaatagccaaaacaattttagaagaataaagttggaagacttatatcatctgattttaaaacttattgtaaaacttactacagtgatccatgcagtgtggtgccatcataaggataaacataggagattagtggaacagaattgagtctagatgtaggccctcacacacacagtcaattcttaacaaagatattaaaataaggtagtggataagaagacagtcttttaaacaaatggaacaattggatatccatatgcaaaataatgaatttgaccattacctcatattatttgaagtggtcgtgatcttaaatgtaagaacaaaaactataaacttctagaagaaaacataggaaaaaatctttgtgatgttgagttagcaaagatttctaaaagcacatagcaaaaatgttgataaattgaatttcattaaaataaaaaataaactttgctctttaaaagaaacattaaaaatgaagagggaagctacagcttgggagaaaagcacatatcaaataaaggacttgtatcaaaatatataaagaattcatataactcaataataaaaggacaaacatgggcaaaatatttgaacagacatttcaccaaagaaaatatgcaaatacaaataagaacatgaagtaacactcagccttatcagccattagggaaatgcaaattaaaaccataacgagatactacttcataactgctagaatgaataaaatttaaaagacaaaaaatacagggattgatgagaatgtggagcaaccctcctaacattactgatagaaaatagttgatattttcttaagaagtgtaaacataaatttgctgtacaatcagtcattctacttgtaggcttagcatgccaacatggcagcatttttcataatagccaaaaacttgtaacagtccaagtgcccatcagctggtgaatagataaagaagatgtggtgtgtccatataatagactactactctggaataaaaaggaacaaactactgatacatgaataatgtcaatgaatctcaaaaacatcatgctaattgaaagaagccaagtacaaaagattagacgttgcaaaattccatttataaaatggagcatagaaagaaagcaagtcacgtggttgcctggggataggaatagtgattgactgcaagtgggtacaacaaacttggggatggtggaaatggattatgatgatggtttcacaactataaatttactaacattcatcaaactatatacttaaaataggtgattttatggtatataaattacacatcaaagctgttttttaaaaaacttcagtttttaaaatttggagattgatttttacttaaatgagtttacttcttttatccagaatatataataaaatctttagagttagatggtgaattgagattgtttggttgagctcactaccaaattttcatcttttggccctgaaccggtacattaagattatatcatatgtctttattttattttttttaagctaaccagtttatatatcttatttccaaacctatgctgcaggctagagattttagtctcttgtaattctatgtttgacaataaattttgtcctcgaatgttgtttaataggatttgaagccacagacatttagaaatgcttatgacataccaagacgaaatcttttggatcacttaacaagaatgagatctaatcttttgaagagcactcgcagatttctgaaaggacaggacgaaggttagaacatagtttcaatactggtatttttaattttttttctttatagtctgaaaaagcatagcatggtgatgtaaatttcaaagaattattacagtactataacattcttattgtaagttcaaacaaatgaagtaaaaggtgaatcatccctgattctgtacctttcttcctaccatcactgttgccccaaattctcttccctagaggtaacaacctttcttaacagtttagtttccttttatagcttttctcatgcattcatgcgcgcacgcgcgcgcacacacacacacacacacacacacacacacacccacttatcaaactgtatacttaaaataagtgatttttcttatctcaatcattttcttgagataataccagtatctgatggtttaactctggatggccagtttcatgacattttctgataattccttcttcacctttatccatggcacctactataaatcaagtcagatgagactttaaacgtttgccacctctgatttaagagttctaacaataattttatataaaagagttagctatgcgacttttttttttttttaccatactgtacttccattttctacaaattctactataattaaattctgtttatttggaatagcgcagaagagaagagatacatctttcacggtaagatcacacatactttttttttttttttttgagtcagagccttgctctgtcgcccaggctggagtgcagtggtgtgatctcggctcactgcaacctccgcatcctgggttcaagcgattctcctccttagcctccctagtagctgggattacaggcacgtgccaccatgccctgctaatttttgtatttttaatagagatgggattttgccatgttggccaggctggtctcattccttacctcaagtgatccggatgtctgcctcagcctcccgaagtgctgggattacaggcatgagccactgcgcctggccacacatactttctgtatgtgtggaattaatggcaatgtatgtatgtgtgaaattaatggcaatttttgttttgtttagatgatgagatcagtattttaaattttattttaaaatattttgtcgcagtggttataattgcaccaaacaaatttagaatatgttggtaaagaagactgtctagaataacactaggtagcattcatatataaggaaacattatttgagaactaattggaggttaactttttttgctgttgtattctttttgaaagatcaagtgcacagtgttcctatagcacaaatggggaactaccaggaatacctcaagcaagtaccttctccactaagagaacttgatcctgatcagccacgaaggttgcatacatttggcaacccctttaagctggataagaaggtaattttgaaatgttctattatgtaatttgtttatggtaggcactgtcagttttatagttcttaatttaactgaagtaagctgaagctattttcctggtagagtatctaataaatatgaacagaatatagttaccttcattggaattgacactggttgtgccatttaaacattgtttgtaaattcaagaaagttgtattcttttttgctaaagggtatgatgatagatgaagcagatgaatttgtggctggacctcaaaataaacataaacgacccggagaaccaaatatgcaagggatccctaaaagacgtcggtgtatgtctccactactaagaggcagacagcagaatcctgttgtaaacaatcatattgggggaaaaggaccacctgcacctacaactcaagcacagccagatcttattaaacctcttcctcttcataaaagtaagaattgtttttttcttaaacattatttgctgccttttggttccttttcaaggaagatatttttgttatagattatagaaggaaattgattagtagtacaatgagtgaatgaatgtatagaaaatttgtttaaatgagcatgtaatcatttttgtatgtctttttaatgaacatttgaacatttcttatttatgatgctttattagctattatgttctaacatacatttgcaaatctttcaaaataatactttcgaaaggagcattatcactatccacagaaagatggttttcaatttcagttgaagtcaactaattattaaatatgtatgctattttggataatgctgtgctttgaggtataccactgaagacaggagtgatctctgccctcatttataatcagcaaggaaggtcagtcattgaacagatattggaagtatgttgaatgttacgaaaaagatgtcaagtatattctggaagcatttggcaagaggatttaagtcaatgaagtcaaggcacttaactgaagaagttaatgcttaagccaaaagctgtgccgtttgcttatgctggagcaatagtatgtgcagaggcataaagagaaagacattaagggaatttaaaaaattccagtatagcaagggtgttgggaatgaggtaaggtgagaactgaaagatagaagccagattatggaaggtcttggaagctattttcaactttattctaaggacagtgagaatccactgaaaggcttaaaatgatggtgacctaatctgattagcattttatgaagaccaggttgactgtaatgtgtgtggactattatcagagaggagcaagaatgaatgtagggaaaccctaatgaattaatggacttatcaattatatatagtggtcatacttacagcatgttaactgaagggaaacaaaatattatatgactcctgatggaagtatccaatactgcctttgaagttgtcttacccaaaaaaaaaaaaaccaaacaccaaaattgaacatcaatgtaatcaaaccaatttataggaaatacaggggacagagaaacatgtgggataccgttagtaaaatccagattgtagaaaactctacaggacaaagaatctgttgggtttttttcctggaaaaaaaatattttttccagaaaaataaaaggggtacggaaggattttacagattcaaatgtagtttaagagatatataagccagttgcaatgtataggccttaactgtactcagaatcaaacaaaatcaaacttttccacaaacagaaaacatgttggagagtatggacactgactgtatatttgatgttattaaataattgtgcatgcacaggaatcagttgggaaacccggggaacagatgctgctgacctgacagtggggtttcaagaagaatatgtatttgagaaatacctggacataccactgaaggacttggttactggtcagatgttgggaccagagcaggggaggagtcagacgtatgtcttgagagacactgggtgggtggaagaagaaatgataaatgagtttagtttagaagtgcatattaggtcatcaagtggagatcctaagttagaagatgaatattgagtttgggctcaggagaagaggattgggctagaggggtagtatgagaggcaggttactgcctattgcactgaataaaatctcaccaaggcaaaaagaagaaaaaacgctcagaacagaaccttgaaagtgccaaagttaagaggagaaagcagaaaaggagattgagaaggaagaattttagagctaggagaaaataggggagaatttaatgtcatggaagctaaagggcaagataattgagtgggtagttgtcccaaatactttaaaaaaaaaaaaaaaaactgttcaatcaagagaaatggaaagattctgtggtctttggcgatcttagcaagagcagtttctgtggagtaaaggggcagagcctaacaaggggttatgggaggagtgagaggtgagaaaatggaaacaatggctatgagtataaacgaccagttaagtttagttgtaaaaggaagatgggaaaagagcatggtatctggaagagttcacagggttttgaaaatggtgatttttctttgtttttaatatcagagatgcttgagcatgtttcagtgctggtggtggaaccagtaaagagggagaggttgaaaataaaaatgagaaaaggcatactcagcacaaaattactgagaacgcaagagggaatggtctagagcatagatgaaagaatgctccctccattgacactgaatgtgggggaagtggggcgagggtgtgtgcaatttagttagaggaaggtaaaggaagtcccttaatcatggctttgcttttcttccgagctctgtgaggtagaaggtgaagtatactgctgagacggaaggggatattgggaaagtcagaggtttgaagagagtgagggagtttaacaatctctgtgggagagagagagaaaagattgtgataaggttgctagacagtgcctgggatccaagtagagatggtgattgtgaccactctgtagagctgggccctatttctccagcagcgctcatgattccaaatgcaagtctggggcaagcagatagtgagtcaagagatgggattttgcttggcagatgttatgggaagacagtagaataagagaaattcagacattagtaaaagtgatatatcacttttacttacagggatataagcctgatacagaattggctacttagaagggatatggttaataggaggaagaaagtagaggaattgctagagtcaaagtctggctgagttaaggagcagtagcgggagtactgtgaagatgatactcctccatctctgaatttgtctggatgtgaaaggcgaaggtgtaagtgtaagttctttagagagaagctggggaatggggaggccaggttcttaacaggtgatctgcttaaacactgaagtcaccacagcacttctcagacttgaatatgcatgtgaatcacctgggaggtctagttaaactacagattctcatttattcagtctgaggcagatgagcatttctagcaagctctctgttggtggtactgctgcttgtccacacaccagacttcgagtagtagtaagaaccaagaatgaagtcagaagggctttgggggtggaatgtgcatggcagatgtgcttgatagcaataactgaagcataccttgagaatgaccctgcttgcagacaacacctgcatgcggttgggagttctgagctagggaatagggtggctaacccaaagatccattccctatctataaggaacatctgtgcccctaacccattgtgaagtgaatgcaggccagacaggggattgaggccctttgttttgggttaaatgaaggttgccaggtggaggttgttagggggaagagtgctaagtgaaaatacgatataaactgtatactttttgcaagcagttgccatttttctgcccagcctgctgccactgggccgtgcagttatcctgtccagcccaccaccattggactgtatgtaaggtgcttctcctgcctagcttgccaccactgggcttgctcccctttatgtagcccccaacaaaacgccttgtcttgtttgctggctctgggtctcttctttggcttcttgaacttggtgccatccccactggagttgataggggctcagcacaacagaaggaaggctatgaactgggtgccagagacaacagtggcttacaggcttgtaccctggagattggcctaagatagtgataaggagagacagcgtgaatggcatggttgagtctcacaagagtgcaagggagtaattttgcaatagcactaggaagtgaaggaatcagtgactccatgtccttttatgcctatggagattgtgcaagagaaagcaatttctacttttggtctggaaaggagagcagtctccatacaggagagctgggtttcagttaaagcataagttgttgtagagaatattcagtaaagaggagtttgcaaatcatggaatcgaatttaggagagagtcaggaatttgggggatttgtgatgagtgtataggggaatatgggtaaactaagtttatagtttggacaggaaatgaggacagtagagatgaattcagctgggatcctggaggttggtgagcaatcagagaacttaaaattcagctgctttctgtggggcaagtctaataatctggtgttaagaggaaggcttgcgagctttcagttttagtagtctaataagctgaagtgggcaccaggttgctctgcactggtaaataaatgatgactagattctctagttagaaggtatactgtaaaacattacctgtttggtggtatgttccctgcagaatttggaacagttaaaggcagaaatataagtggaaagtaaaaactacccagtgtttacttttgcctctaaatgataccagatgtataaggcatatgtgtgagttagggctctctaaggtagagatagatgaccgtgataattttgatcatagatatttcattgaagtatcaagaacctacttgtttcaataaaattgctatagaataaaccagaaaactaaaaactacttgaaattggctttattttttcctccaagggtaaaaattgtaaatattttgtaaatactgtgtatgtgtcacattgaaatctaccgtatctttggcaatgcttaaaaactatatcacattatttgttaacttgcattagtcaaggaaaacagttgacttgctgtagtaatgttcttttgtagctttatttactgtatgctttgagactggatcccataattttttccccgtatctttgtttttagtttcagaaaccactaatgattcgataatacatgatgtggttgaaaatcatgttgcagaccaactttcatcagacattacaccaaatgctatggatacggaattttcagcatcttctccagccagtttactggaacggccaaccaatcatatggaggctcttggtcatgaccatttaggaaccaatgacctcactgttggtggatttttagaaaatcatgaggagccaagagataaagaacaatgtgctgaagagaacataccagcatcttcactcaacaaaggaaagaaattgatgcattgcagaagccatgaagaggtcaatactgaactaaaagcacaaataatgaaagagatccgaaagccaggaagaagtatgtataataagagacgaacctcagatctgatttctgtatgtgctcaaaaagcaaaaaagaaaaaaaaagtcaagtaactgtagtaaaagaatacatatgattctagatctgtcttgaacaacatctcagttaagatcctttattcatctgaccaacaccaaatatcttctatttccaaggtactaggtatggtggtaggcagcagggactgagagcagagcaacactgtacagataaattgacaggaacccatagtcttgaatattctgaccaacgatggaattttaatatagcagctagctcacaagagatatagtgaaaattaaatgacttcatgtctgtaaagttcttgtcatagtgcctaccactatgtttagtagttaaactgtgatattataggatatgtttaggccaaaaaactaaagttatgaaagctctctggtatatgaacacaaaagaacttcgtgggaaaaagttcagtattattggcattcatttagaggatgttaacagatcacttgccctggggtagtagaatgacctgggtggtccagaaatgggaacaaatcagtccttggagttcagacgtttatagcccttgcagagtttcatatgaaaactttaaactgaaataacactcttaacctgtctggtttttacccccacttcccagttacccccatgttagctgttagaattttaaactgtaaggatggagttttgtaaaggccacttgttcttattttttagtgatactaccataaagctatttactcatccttttaagctttatgtttgataccttaataggaacttttacttacaaagcagggtttgattagttgttttatctttgttgctgtgtacttacttttacatatatgttaaaatataaaatctctaatgagtggtgaaatttttatgtagaatgtttttatctcagtatatcttaatatcataaactgcaaaagaagaatattgaataagaatacaaatgaaaggcacttaatttttctttttgtttcttttgctttaagaatatgaaagaatcttcactttactgaagcatgtgcaaggcagtttacaaacaagactaatatttttacaaaatgtcattaaagaagcatcaaggtaaataaactattgcatataatgaaatggtgatgaaatgagtccacagtttatataggcagtattttaatagtatccgttttgcacttgtattgtttataaatgtatatggcataccaacatataaataaattcttattcttttttagtttattgaaagaaattcacttagaaaacagccacacatacattcttcaggaattatggaccttttctccctacaaattactggatacttggagaattcttgttattcttctctgtagctttttgatatctttacattaatattttataacctttaatttttctcctttatacattaatattggtgactaaaaataacgtacttgagtgtcatttatttttacatgggaaaacgtaattaaggagacaagaattggacaaatgggccttattctgattgtttcagtagcccaggatcattagtacattggccctctgtatccctgggttccacattcattggattcaagcaaccacagattgaaagtatttggaggcggggaaatggatggttgtatctgtattgaatatgtacaggctttttttttcttgtcattttctaaataattcagtctaattcatatcgtatttacactgtattagtattataaataatgtagagattatttagagcatatgggagaatgtacataggttacatgcaaatattgggccattttatacaagggacttgagcattcgtggattttagtgttcatagggaggcctagaataaatcccccatccataccgagggatcactgtgtaaagaaggtggataaaggttataaatggtaattaagaagtgcaattaactggaaaacatagttgtatgagtttaaaaacattttttattttcccttcaagattttggggattttagtattataagaaaacttggggcttatcacatcccaccttctaaatgtaaacacacttatactttgtccccctgtctcttctatgctacacatgaagattttagataaagttggttttgtttctggttttcttttctttttgtacttttggagtggctagagcataggccagtttgcaggatcaagataaggctataacttttcatgtaattttgagtatttaacctattatgctctttatggtaacattctgtcagctaaaacctcattaggaatttatatccccggtatctgtacttcacttctgccaccttttagagagttgtgtagtattatggtggctatttatattagcttctaagtagcaaggaagtaggaataaaatgtccagtgtcttgggatattcttaaaaccgtcagcagttacgtatacagatgcaattttagtctgtccatatttgttactgaaaatctttaaaagttgttacttgaactttaactgcttgctatactctgtattatagatgtctatccttgatttgctagctctcaaattgtaatagaataccatggtttttaaatgctgctgaccaattttcatttcttcttccattttgtgggagattatattcatactttgttcacattcctttcaatattcagcttacaaagagcatgagaagaagctattgaagtatttgcttggggagcccaaatttcactagagtgtttgcagcccttgaatatattttgaatatattagttttttgtttttttgtttgttttttcctttttcttttcggttgtggaaggaacaacctctttcccattgtttagccctagagtgttttagggacaaactataatactgtactaggataataatttgctaatctttcaacatattttatattgtcgtagtattgatttttctattttcatttcactttgaaaaatcttcccaaaattttctctcctttcttaaaaaaattatactgatatatactattcattaaaaagtaattgagagtactatttattttttcatacaggtttaaaaaacgaatgctaatagaacaactggagaacttcttggatgaaattcatcgaagagccaatcagatcaaccatattaatagcaattaaaagaaaatagaatgtggccacttatttcactatcttcttcaaatacaaagtaaatacaagactgttgtgatcttgcattcattttctgacatgcattgttggctatttgaaatactaaaagcaaatctacagatcctttttccatcattttacagtgaccttttcttcattttggtttatttttgtaatgtgaaaagtatcactctaaaaaacatttttaatttaacaaactaaaaatattcctccaaatctcttgcttgtcattgactcttgcgtgtcaatttccctcaggttctattttcttaaaccaacctttaaaattgtcacctctgttaaggttgaactttgccaaaaaaaaaagaagttactttgtaatttttggggaaaaaagcacatacattaaaactaggtaatgttttgtatatacagttattttggatatattattgtaagttgtacaaatgtattttgaagaatatttaagaaaagcacttttgttattccatcaataaatgctctattttactcttgtgtggtttaggaaataatcacatttaaagtaatcatttaaaaacatcctaagataatggaattttaaaggccttgctttttagcattggaaaaatacaccacttgaagttcatgtttgttaagcctaactgtaattacatgttacataatctgcattgcctttttactatatgttcgtagtttttgttggccatgccaacatactcccatttctgcctagattatgggaatgactttgtatggggcagatagacagatactttaaaagctatttaaaaagcaaacaactttggatattattggtttccttacttcaacaccttttcctttatcactaggattgtggatggcacgaagctgaagctgttagggagtggtaggtttggagtacagtacatgctctgaaatatctagcctttagcagcttcatgccatgcttgcaaaagcccacaacaaattggaggcctccttgttctgctctgctgttctcacacttaaactctgttttatttataagctaaatggaaaggaaacacctttaagatgactttgctcattttgcatcccccctgagtttcacaggataaggaaaaccacgctattcattctccaccctcaattcaacatggcctagagtatccgtactgaggaagcaatcttatggcctgactcactcaccattcatgatcactgctgtgccttttagtggtttggggggtaagcagtagaaaagaaggtcaaaatagatttggattaagagtaggcaaaataaacttataacatttaaaaactgaagtatttttaggtttataatattgaaaatcacatacccttagctttttacactttatcagacatttttttaaatttcaagggtatagcaaaatgaaattataactttatgaagaaaagcattgatgaaagtggagaacatgcatttagtctaggggatttgaaactctcccaatactgaagacaaaccctgtcaagaaaaagaagaatttaatattatatagtattttcatatgcagttctttaagctttgtttacttctatacaaatacttttaagtaatgcaagataacatttaatagatggaattgttaaggtaattgcctgtagtcacattgctaaattcattgagagttacacaaaatccagaatatattgtctgttcctaaattatatatatttagattctggaattactaggaggaattagaagtcattcagataaaaattcatacttaacaagagtatctaggaaagagattcagcccatcccaatattgagcagctttccttatcagaaagttttattttctgtttcacagattgctcatgacctttaatacatttttctgaatgaaccctggagggaggtgagaagtagcagttttgttcatctcttctttttgtcctttatctctctgccactgttctcacctcatcctaaaacctggtcaggagggtttgaaacctatcagaactaaaggttaatatctcatctccctcaggcttttttcatttaaaaaaaaaatgggtatattagttaaattagaatacttgttgtagaattattgtcaaaggggaagggaaatacatctaggggaaacatcatgtcttttaggccctttatgtcactgaatgacttaaggctcgacaaatgatattcttggaaagtttaatcttgaggttttcaaatctttttttttaatgtctcccatgtttctcatttgctgattgattcattagttgctcttagtaagatttgtcagttggaaataatgaaggctgagactcatttctaaactcttccataaccatcaccagaagagcagccactgtgttgtgtgatgtaggctaatgcctcccagatagaggtaaagtcacaaggactattagaattccagtggattgtggaactggttttggattatccttatattttcattctgattactgaggcagttctgaaaactcctaccattgaaatagtggtgtgtcttttccttgtttaaggattttacatcatttttatgcacttgaattccaaaatcagaatctctcttttacctatcaacctttattggctattggcttttggcaatgacctttctgttcaaatgtagtcctgtctctttgtttccttagggagtagaacctgtcctttttctcatctttcatttttttgacgtgtcctttctaagagaaggctctctgccgcctgttctgggtgataagtgatattttcatctaatcgttatgtggttgggatgatcatggtgaaatactaggaagacatactctgttgatggactttttctctccaaataatcccaaatagattattttctagtgaatggtttatatctttctcgtcacaaaaatgttcctttgatttctagcacaaggtacagcaggatgcaaatgattctcagataaaatgatgttgacagtatttccttaacaatttatgtaaaactatgcataattttcattctaacttttgacatttttctccataaataaaagtaatgcctgatgtttagttaaagtagatccacctttgcttgattttattagtcttgttctatcctatttctttttaatacactgtttagacttgccaacaactcttaactgagaatctcttttccttcctaggctaagtaattgtgagtgggggaggaagaacattaagagaaataatctaaagactttgttcaatattgtcgaagcctaagaatatttgtgtgtccttctgatgtactgaggctttgccggtaccacaccatctttggattaccataaggttatgtagtaggacttaaaagtactagggcaaacatttgatttttgagaaagatcaacagaacagtatagaaatccaggtgcattcattagaatactaggatcacaagaggactactctggtgtactctagtgacctgaaaaaactctaaaatgataagaaagctaggggacaaagggaaaaaagggcaagatttataatttattttactttcatgatttttccaagtgtcttcagaagtagaaacctatagcattaaaaaaaaaaatctacattaactatatatgagctgagagaatgagaaggtaaaaaacatggaggataagtttcctttgtacttacgaaatagtcccctttcttaggatagaagatagcaactgggtagcttctgaagcaccataaaaacagctagaaagaatgcttatttttgaggggatagtggacaaatgagcccttgttgctagagagacactgataaattatctgaatcctgtcaaaaaatactgtaatacctgtgttaggttctctcaggaaatagatgaatggccgatctgctttaaaaataggaatccgagaccttttcaataacaacagagctgcaggaaagaaagaaaaattccattgcattttctgtgcatttttaagaaaataactattggttatgaagtaagttaattttttaagaaatcaaagcatcctaatggcatttgattgtttactgttgtgatgggggtgcagatgggaaaattaaagagaaaagatgccatttagccaatcctgtctcctgttttcaacacattccatggaataaattccttattgaaggtaactttcagaattatttttatgggatggatatctcttcttccccgtcatttttcaaaaactttttgttttctttagtgttcctttttaaaaaatactacaccacacctgaacttgggggttatggaaagattcagaagtgtgaagattcaactaggtaaatttcagaaaggtagatatgggtaagcagtgtgactgggtattctctgaacatacctgtggctccagatgccttggtgccttcctccaaaacttcaatcttggccttgtggattgcttcagaaacataaaagccatcttggcctaaccacagaaaatgataaaaatgtgagttgctcattaacatttttctaacacatttagaacacattctttaaaaatgtacttacaaaatttatagtatccaatgctgcttactgtgtagctagggaaagagtggaaaattctgtttttgtttttactggaggctcaggtagctgtttggaaaattcttaagactcaatatgttaccaaactttaatttgttatatatatttaatttgttaaaatatgtaatcgctcccaaaataatattcagagcactgccccattttttcagtggttcattttcagaaatgattctagttaaaactacaatccctccttcagccagtatttcctaaacttcagtgatcatagggtatgtgttaaaatgcagattctgtagcccgggaatcattttcaccaagcttcagagatcatttcccttgaatgcctttttggactgcactttaagagccacttttaaatgacaaagtcacaggtttttattacaggctttattgaggcacaattcagagtaatatgaatgtgtctagtgttgcatgactgtattctgtatacttaggtgtatcagttatgcaattaatttgcctcatgggctagaatctacaaagcaaatgagaggttagtataaatgttctatgtgctaacagtttcacagattataagtttagcaaataggactaagtgataatttagaggaattggctgatttttgtaagctaatcattaaccatttttaaacagctccaaagatgaaaggatacttgatgacacagtaaaaaatgaaagatttagaaccagaagaaacttaggaaatcattcagtccaatcctttcattttagagtgagctgtgaactcacctgagatcacacatttgaaaagcagagttgagaatattctgattgaaagcccactcccatcccacccctctcctccattcaaacactgccgcctttcagaaagtgtatgctagtcagctccaacatgccactgggaggtatctgtggcatgaatgttaaaatgatcagtttgatgaacacatattgtgtgagggagctttgtttcatcttagactaacgcttaaattggtttgtgtttgtcacgcacacacaggagatagcccatgaatgccatgagagaataaaaccagaccaaaataaagaatatgcggcattccatccatcttgtaagatgtgcacaggatgttgggagttggctatattcactgtaaggaacagttattttccagcatcagtgaaggggacaggaagggccagaggaagtaaaaatcaatagaaacattcactagtgtcacttgtcctaaaatcagcaaagaatttgatttattttagcagttggtctttttctctagggtctttaagaaacaaatttcactatcaataattagcccctcttactagctaattaagcaaactgaaatgcagtgccaaagttacaaagagctttagggttaaagaatggttatttgacagtcatgagaggcttttactaatctccgagacttcatgactatataggatggtgtctgaacattttaaatgaatgttggtgaaataagcagagattcactatgaaaccccttatcagctaaaatacagtaaatgtgtctgtattagtctgggcaccttggcagtgtgagaaatgagaccagttgatgtggatgagtctggttagatgggccaggctatttcagtattttgaaactgcaactgaagagtttcatttaaacagtttctctccatcagactataggagtggtccaataattgacatttatatgtttgcacagccataaaccaaggtccatagcctatgtcatgccccagcatcagcatcttttaaattttatctctggtaagagttgacatttcaaaagaccaacatatgcgataaaaatgagaatatgggagtcatctatggttttgcatttttcctcccacttgatcttgtattacagattcctattattttttattgagtagctattgaaatattacagaactaatgaaatgaacctagaagtcaagcacaaagggattctcctggtctttttctactcccctgaagtgttgacagctgcttagtgccattgagggacatacgccctattttcccaaaagttgttctcaagattgtttataggtggcattctgtaaaagggttccatgattaattatatgtgggagatgctaaacagttttgcacttttgttttcagtaggggacttcttagagctgctaatctgctaacttttatagtgaatctctacaggacaattataatacatagcgtttaaccatagaaccacccacaccattctctgtcccagatttacaggattagcattttgggaacatactttgggaaactgtagcccaccataaactcgcttgctcctacaatacaacattctatatacaaagcaaaggggtgatactcttcctaccctccctcctggcatactctccactcttcttccataacatcttctatgggtttttaccttcctttttagactattagctcctagaagcataaatgatgtcttaatcattttaaatatttctttgcccaacttacattaaaaatacttggtacattaatgtgtttagtaaatgctggatgaattaataatagacaccccttaccactatacgaatggccttaatgttctttaaccttgttaaacttgtaaggaaatgctgattggtgtttgtagaaccataaaggcgtggcatagaatgggtcatctgcaagtctcagccaaatgattgtttcagtgctttgttggtggacaccgttattctttgtgtatggctggtcatactcaaaaggttaaaagtcttcaaaacatgacgttgtataaacattgtgtcccaacatttcatcctcagcttctcataaatcaggataaacatatcatttgctgtttcttttgtctttacaattatttgctgtagccagtgttagtggcttttaaaatgttattgccagaacttgcttctagtttatctttttcatcttgtcacttagttgctaacactaagtgttagggagagggggctagagagagaaacacatagcacccggcccaggagagggagagagagtgctaagaagaatctgaaatggcctttgaaattaggctatggttagttgctttctccatttgtctcctctagcccactctgcacctctttctattgcaattctgaccagacatctggtgtggcataagttaacttacataacttccatactcaaccaaacaactctggtttgttcatttaagtcatagtaacagagaacttgtacttcttaccgagcagagattggaaactacctacttataaaagccaagaacaagacagtttcttcagagtttcaagtttgtgcacaaggagtattttgtggactaggaggcatgggtctatatcaaagcctgctgatcctaaagccagtgggattgcttaagaagagtatctttagctggcatcttcagtgtgagtgaaactggaattactcttaaaagctgcataacatctagtatcaaggagactgggggggaactacactctggtttcagctgggccttgagataatattgaatgagtccttaaggcagcaaaaaaaatatttgatgccaagaaggaagagataagtgacttgtaaatggggaaagagaatttgagtaaaatgattctgggctttgggaccgaaaggccaaatgtttgctgtggtggttggagttccatcagtagtacaaaactgcttggtaatccctcgtaaactggaagaagagaggagaggccagtattttctgatcacttactctctggcaaggtctctgctgatgtcatactataagtaaatgattttgtttctacaattaagatgtgtggtgagtggtagttaccccattttaggaatgaggaaactatttgttggagagatttggtggccctgtctctagaatattaagttgaaagcccatttgggcagagaagtggttagtctcttgattatgtttaaagaaggacattaagaagcaataatttggttggcaatctttttctataaagggccggatattaaatattttagccactgcaagccatatggtgtctgtctcaactactcagttttgctgctgtagcaggaaagcagccatagatgatttatgaatgaatgagagtggctatgttttaattaaacttcacaaaagcaggtggtaggccattgtttgctgacccctgctttagaggaacaaaacttcatgagagaaaattaacagactggcatgttttgtcagtaggaaatgtgaatgcaagcttcatacttggcacatgataattgcttcataattattaaataagccagatctgcctgcctacctttctgctggtttgagcaaatataagtagatttgaatagcgttaaaaaaaaaaaaaaggtttcgtatcaaaaaaggtacttttaaaactaggttatttattagatcttgccagaggagtttgtggaccttggaagcctttaccaataggggagctacatgatgtgtgttaagatcagtcctgtttgaggacagagggttgatggcacattaggatgtacttttaggacataaaagggagagctttaggagttatgaagggacagtcagtaagccctagtgattcacggaatacagtgatgtagaagaaaatacagcgatgtagaagaaaatacagtttttaactctgatcatcaaaatcaccagcaacaacagggatgccatggctgagctctggagttgcaagaagacactggttagattttgcacattatcaaacatagaattctcttaagttcttcatcccttgctctttccttgccctccaatcttttcacttcagtattcctcctttgcttgaaatgtcagattatgcctgtgtcagtaaggaaagtttctgtttgagtcatttgaccaagtcaacagtatttacttggtatccaactgtgtgccaagcatcgttgtggacacaatgcccaaacttgactattgctttgctatctctttgcgtgttcaggcaatgagtacagagctggtagattttaaactctgtagaatagattctcactcctgtgttttatttgataagtaactgtcaatctggtcacatctaaagcccaaaccaagacttctcttgtggatcaaaatctcaattttcctgtgattccttaagaaggaagattctgagccaagatttagaaaagtccacattatgatgttctagaattcaaaatagtgattttcaagcccttcaggtaagggaaatgtcaaggccaatggaaataccagctacagtatcatctttgcacagataatttactatccagagtagaaacaaacctgagcctttgagttggcaatagtttagccaatggtgtcttgagaggattgtagaacataggttctggcattcactccctgtttatatttgatataaatttcctataataccataagcaaacagcacctattgattggtagtagcaattcaactttgtgcaaagaaattcaatgtggttggtggaaaggagaacattttaaggcaaggttgtaagagtatgggtaatttgaaaaaaggaaattggacagatgagggaaggtttcaagactagcttattagaagaggacagagaaggtattgggaaggagggaggaaaagggtgtagaaacaaagggtgactgaagctgatgggacagcaggaggtcataatgaagaatctattgctgcagcaatgccttgggtacactcctagtcatgacggttagagggagggtctgtttactgtgtgctgtggacattgaccccatggtgaaggtcgtctctgaaaaccatgattaaggcctgaagaaacatcccttcctcacaagatctaacccaaatttgactgttattagaagcaacacattcttatataaaacagagcacctttcttattcttttacataatgttgactctgaaatgagaatcccttaatcaaagtatgataaaactgccccaaatacacggctagaacgtttggaagaagaaccgtttttacctgaaattcctttcaagttagctttgagtggatcaaaaagatcggtgactccccaagaatttaaaatgctttttaagttgaattgattttggatcctaaacctaaaaggcaaaaacaaaccatcaactttcaaaattctcactcaatatactttcatacacaccacatgaagtccaaaatccctaacttggaagtcaggctggctccaccagatttatttccagcttcatcttccatggcgccttcccataagccctaatctgaccacacagggctcttccccacctctgtactcttgttcctgctgttcattctaagtcttcccattgactttgattgtcttttagttattatccatttttcagttgttacctcctcctcttttcttcagctattttgtgacctttggttcttaaagccccattaataccttgttctgctcttacgatatatagaacattctgcttcctattagtgtcatttatgttattgtaaactacctgagaaaagtggctatcccaattcattttttaaacacttttttttttttttctgagatggggtctccctatgttgcccgggctggactcaaacttctggcctcaagtgatccacctgccttagcttcccgagtagctgggactgcaggtgtgccccactgtgccaggctccaattcatttgtatttcttaataaaaattaatatttaatgagtgcttacattatgctagatactataagagctttatgtggattatcagacatttcatcttcatataactatgttattattatcctcattttacagatgggaaaatcaagacttaaagagtttaagaaacttgcccaagatgacataatgagtatgtgatggacctcgattcaaatcaagcctgtgtgtgtgcagagcccatgctctagtcacctacattttgctacctcccatctcgtgtggcatctcacatatagtaggtgcagaaaagaggctgttgactaattgccttattgacaattaatagagtattttatttaatagagtgtttatactggataaaatatattttcatatttgctgtgtgcactttatgcctttggagcacagtgggaaaagaatggaacttaaagccttggttttcctagtaaaccctttgagcacaaagaatcactacaccaattttatatttccccagggacaaggcatttaaaaatttactgttgaaggatactttaaaagggctgctgatattatttttctttgaaaataaaaaagatcaaaatgg

SEQ ID NO: 186 - DNA, 1951 bp, Homo sapiens
cccgcccccacctcgcggtccttccgcagtccggccccgccccttcccgaagcccgcctccgggtcggcccgcccgcccgctcgcgcgcacccgacgccccgcctctgcgcgtgctcaataactgtccccggagccggcctacaagcttcccccgcccctgagctgtttaaatatgctaatgaaaggatagggcctgaccagtagaacggcgaggcggtgtatcacgtggctcggggacgtgtcaggggcggagcctccgcagcccctgcccgagttaaaaccggagtgtgagagagaaaagcgcttcagtagcgagaggggctgagaaagtggtgacaccgccggggtgcggagggagtccctgaaacttctcccaacagccccagggccaatcttccctcagcccactcccctcttcgccagctcccaggtccccactcctgtaccgggggtggggtggggagccaggcccgtctcccgctgggacacacacaggggccgggagcggggacgggacccccgaggcgggggggacgaaccgacagacagacggctgggcgcccgccccagcgggcaggcaggcaggaggaggcggaggcgggggtacgacggggagcactgggtctggggagtttcctctcaactatcgggggagaaactccccgcagccggaggaaagacccagacagtgttttcctcccgggggccgtgctcccccgccccgcgtagcggcggtcgccgccaccggcgcctccacctctaccatctcctctttctccaccacctcgggccccggtgtccccggccagcactatgcccatcttactgttcctgatagacacgtctgcctctatgaaccagcgcagccatctgggcaccacctacctggacacggccaaaggcgcggtagagaccttcatgaagctccgtgcccgggaccctgccagcagaggagacaggtatatgctggtcactttcgaagagccgccctatgctatcaaggctggatggaaagaaaaccatgcaacgtttatgaatgaattgaaaaaccttcaggctgaaggacttacgactcttggccaatccctaaggacagcttttgatttattaaatttaaatagattagtaactggcatagacaactatgggcaggtaggttgaataataaggtggcaaaatagttgatttttcattttgtggaaaaacacagtccagtccaaaaactacataacatgaaatgcaagtataaaacattccaaattaaaatagaatatgcacattgttcaaaggcaaaactcttaccctactatatatattttacatccctcattttttccccctctaaaatgcattggtattcaggattagaatctgaatcttttgctataaagttgacatacattggttttaatcccttgaaagttcagtaaagacctaaaaggaaaagcatcctaccacaccacactcatgttgtatgtgcaactattatagtggcttagagacactagttcgtgttcttcgtttctatattagtaaagatgttagaggaaattaatctgtttgttgcatcagggtttaatgtgaccatgttgtataactattctgaaaggtaagaagtttttcactggagtacagtcactggctgagaacatttaagttttcttttgaagcatacacagttaacaactattgcaggaagaactctgaattaaatttcaggcccagagttttgatttaaactccaaacccttggaaaaaaagactgctggaaaatatgaaagaacccttcgtttcttaacccccacaagtccttttattgcacttactttcatgtatttgaggatgagaggagctttaaatcaacaataattcactaaggaataatgcaaggtggtctattgtaacattttatgatattattgccctggaaataaaagatactgaacaatg

SEQ ID NO: 187 - protein, 115 aa, Homo sapiens
MPILLFLIDTSASMNQRSHLGTTYLDTAKGAVETFMKLRARDPASRGDRYMLVTFEEPPYAIKAGWKENHATFMNELKNLQAEGLTTLGQSLRTAFDLLNLNRLVTGIDNYGQVG

SEQ ID NO: 188 - DNA, 3999 bp, Homo sapiens
cccgcccccacctcgcggtccttccgcagtccggccccgccccttcccgaagcccgcctccgggtcggcccgcccgcccgctcgcgcgcacccgacgccccgcctctgcgcgtgctcaataactgtccccggagccggcctacaagcttcccccgcccctgagctgtttaaatatgctaatgaaaggatagggcctgaccagtagaacggcgaggcggtgtatcacgtggctcggggacgtgtcaggggcggagcctccgcagcccctgcccgagttaaaaccggagtgtgagagagaaaagcgcttcagtagcgagaggggctgagaaagtggtgacaccgccggggtgcggagggagtccctgaaacttctcccaacagccccagggccaatcttccctcagcccactcccctcttcgccagctcccaggtccccactcctgtaccgggggtggggtggggagccaggcccgtctcccgctgggacacacacaggggccgggagcggggacgggacccccgaggcgggggggacgaaccgacagacagacggctgggcgcccgccccagcgggcaggcaggcaggaggaggcggaggcgggggtacgacggggagcactgggtctggggagtttcctctcaactatcgggggagaaactccccgcagccggaggaaagacccagacagtgttttcctcccgggggccgtgctcccccgccccgcgtagcggcggtcgccgccaccggcgcctccacctctaccatctcctctttctccaccacctcgggccccggtgtccccggccagcactatgcccatcttactgttcctgatagacacgtctgcctctatgaaccagcgcagccatctgggcaccacctacctggacacggccaaaggcgcggtagagaccttcatgaagctccgtgcccgggaccctgccagcagaggagacaggtatatgctggtcactttcgaagagccgccctatgctatcaaggctggatggaaagaaaaccatgcaacgtttatgaatgaattgaaaaaccttcaggctgaaggacttacgactcttggccaatccctaaggacagcttttgatttattaaatttaaatagattagtaactggcatagacaactatgggcagggaagaaacccttttttcttggagccagcaataattatcacaattactgatgggagcaagttgactaccaccagtggagtccaggatgagcttcatttacctcttaattctcctttgcctggaagtgaattgaccaaggaaccttttcgttgggatcagagactctttgcattagtgttgcggttgcctggcaccatgtcagtagaatcagaacagttgacaggtgtgcctttagatgactctgcaatcacaccaatgtgtgaagtgacaggcggccgttcatattctgtgtgttctccaagaatgcttaatcagtgtctggagtccttggtgcagaaagtacaaagtggggtggtaataaactttgaaaaagcaggaccagatccttcccctgtagaagatgggcagccagatatatcaaggccttttggatctcagccttggcatagctgtcacaaactcatatatgtcagaccaaatcctaaaactggggttcctataggtcattggcctgttccagagtctttttggccagatcaaaattcgccaacactaccacctcgtacatctcatcctgtagtgaagttttcctgtacagactgtgaaccaatggttattgataaacttccttttgacaaatatgagttggaaccttcaccactgactcaatttatcctggaaaggaaatctcctcaaacatgttggcaggtgtacgtgagcaatagtgcaaaatacagtgaacttggtcatccttttggttacttgaaagccagtacagcactgaactgtgtcaacttatttgtgatgccttacaattatccagtccttcttcccctcttagatgacttgtttaaagtgcataaagcaaaaccaacattgaagtggagacagtcatttgaaagttatttgaagacaatgcctccctactatcttgggcccttgaagaaagctgttaggatgatgggagcacctaacctaatagcagacagtatggaatatggacttagttacagtgtcatttcatacctcaaaaaactgagtcaacaggccaaaatagaatctgatcgagtcattggatctgtaggcaaaaaagtagtacaggagactggaataaaagtccggagccgatcacatggtttatcaatggcatataggaaagattttcaacaactcctccagggaatttcagaggatgtccctcacagactgctagaccttaatatgaaggaatacactgggttccaagttgctttgctgaataaggatttgaagccacagacatttagaaatgcttatgacataccaagacgaaatcttttggatcacttaacaagaatgagatctaatcttttgaagagcactcgcagatttctgaaaggacaggacgaagatcaagtgcacagtgttcctatagcacaaatggggaactaccaggaatacctcaagcaagtaccttctccactaagagaacttgatcctgatcagccacgaaggttgcatacatttggcaacccctttaagctggataagaagggtatgatgatagatgaagcagatgaatttgtggctggacctcaaaataaacataaacgacccggagaaccaaatatgcaagggatccctaaaagacgtcggtgtatgtctccactactaagaggcagacagcagaatcctgttgtaaacaatcatattgggggaaaaggaccacctgcacctacaactcaagcacagccagatcttattaaacctcttcctcttcataaaatttcagaaaccactaatgattcgataatacatgatgtggttgaaaatcatgttgcagaccaactttcatcagacattacaccaaatgctatggatacggaattttcagcatcttctccagccagtttactggaacggccaaccaatcatatggaggctcttggtcatgaccatttaggaaccaatgacctcactgttggtggatttttagaaaatcatgaggagccaagagataaagaacaatgtgctgaagagaacataccagcatcttcactcaacaaaggaaagaaattgatgcattgcagaagccatgaagaggtcaatactgaactaaaagcacaaataatgaaagagatccgaaagccaggaagaaaatatgaaagaatcttcactttactgaagcatgtgcaaggcagtttacaaacaagactaatatttttacaaaatgtcattaaagaagcatcaaggtttaaaaaacgaatgctaatagaacaactggagaacttcttggatgaaattcatcgaagagccaatcagatcaaccatattaatagcaattaaaagaaaatagaatgtggccacttatttcactatcttcttcaaatacaaaatgggaaaatcaagacttaaagagtttaagaaacttgcccaagatgacataatgagtatgtgatggacctcgattcaaatcaagcctgtgtgtgtgcagagcccatgctctagtcacctacattttgctacctcccatctcgtgtggcatctcacatatagtaggtgcagaaaagaggctgttgactaattgccttattgacaattaatagagtattttatttaatagagtgtttatactggataaaatatattttcatatttgctgtgtgcactttatgcctttggagcacagtgggaaaagaatggaacttaaagccttggttttcctagtaaaccctttgagcacaaagaatcactacaccaattttatatttccccagggacaaggcatttaaaaatttactgttgaaggatactttaaaagggctgctgatattatttttctttgaaaataaaaaagatcaaaatgg

SEQ ID NO: 189 - protein, 883 aa, Homo sapiens
MPILLFLIDTSASMNQRSHLGTTYLDTAKGAVETFMKLRARDPASRGDRYMLVTFEEPPYAIKAGWKENHATFMNELKNLQAEGLTTLGQSLRTAFDLLNLNRLVTGIDNYGQGRNPFFLEPAIIITITDGSKLTTTSGVQDELHLPLNSPLPGSELTKEPFRWDQRLFALVLRLPGTMSVESEQLTGVPLDDSAITPMCEVTGGRSYSVCSPRMLNQCLESLVQKVQSGVVINFEKAGPDPSPVEDGQPDISRPFGSQPWHSCHKLIYVRPNPKTGVPIGHWPVPESFWPDQNSPTLPPRTSHPVVKFSCTDCEPMVIDKLPFDKYELEPSPLTQFIRKSPQTCWQVYVSNSAKYSELGHPFGYLKASTALNCVNLFVMPYNYPVLLPLLDDLFKVHKAKPTLKWRQSFESYLKTMPPYYLGPLKKAVRMMGAPNLIADSMEYGLSYSVISYLKKLSQQAKIESDRVIGSVGKKVVQETGIKVRSRSHGLSMAYRKDFQQLLQGISEDVPHRLLDLNMKEYTGFQVLNKDLKPQTFRNAYDIPRRNLLDHLTRMRSNLLKSTRRFLKGQDEDQVHSVPIAQMGNYQEYLKQVPSPLRELDPDQPRRLHTFGNPFKLDKKGMMIDEADEFVAGPQNKHKRPGEPNMQGIPKRRRCMSPLLRGRQQNPVVNNHIGGKGPPAPTTQAQPDLIKPLPLHKISETTNDSIIHDVVENHVADQLSSDITPNAMDTEFSASSPASLLERPTNHMEALGHDHLGTNDLTVGGFLENHEEPRDKEQCAEENIPASSLNKGKKLMHCRSHEEVNTELKAQIMKEIRKPGRKYERIFTLLKHVQGSLQTRLIFLQNVIKEASRFKKRMLIEQLENFLDEIHRRANQINHINSN

SEQ ID NO: 190 - DNA, 4705 bp, Homo sapiens
cccgcccccacctcgcggtccttccgcagtccggccccgccccttcccgaagcccgcctccgggtcggcccgcccgcccgctcgcgcgcacccgacgccccgcctctgcgcgtgctcaataactgtccccggagccggcctacaagcttcccccgcccctgagctgtttaaatatgctaatgaaaggatagggcctgaccagtagaacggcgaggcggtgtatcacgtggctcggggacgtgtcaggggcggagcctccgcagcccctgcccgagttaaaaccggagtgtgagagagaaaagcgcttcagtagcgagaggggctgagaaagtggtgacaccgccggggtgcggagggagtccctgaaacttctcccaacagccccagggccaatcttccctcagcccactcccctcttcgccagctcccaggtccccactcctgtaccgggggtggggtggggagccaggcccgtctcccgctgggacacacacaggggccgggagcggggacgggacccccgaggcgggggggacgaaccgacagacagacggctgggcgcccgccccagcgggcaggcaggcaggaggaggcggaggcgggggtacgacggggagcactgggtctggggagtttcctctcaactatcgggggagaaactccccgcagccggaggaaagacccagacagtgttttcctcccgggggccgtgctcccccgccccgcgtagcggcggtcgccgccaccggcgcctccacctctaccatctcctctttctccaccacctcgggccccggtgtccccggccagcactatgcccatcttactgttcctgatagacacgtctgcctctatgaaccagcgcagccatctgggcaccacctacctggacacggccaaaggcgcggtagagaccttcatgaagctccgtgcccgggaccctgccagcagaggagacaggtatatgctggtcactttcgaagagccgccctatgctatcaaggctggatggaaagaaaaccatgcaacgtttatgaatgaattgaaaaaccttcaggctgaaggacttacgactcttggccaatccctaaggacagcttttgatttattaaatttaaatagattagtaactggcatagacaactatgggcagggaagaaacccttttttcttggagccagcaataattatcacaattactgatgggagcaagttgactaccaccagtggagtccaggatgagcttcatttacctcttaattctcctttgcctggaagtgaattgaccaaggaaccttttcgttgggatcagagactctttgcattagtgttgcggttgcctggcaccatgtcagtagaatcagaacagttgacaggtgtgcctttagatgactctgcaatcacaccaatgtgtgaagtgacaggcggccgttcatattctgtgtgttctccaagaatgcttaatcagtgtctggagtccttggtgcagaaagtacaaagtggggtggtaataaactttgaaaaagcaggaccagatccttcccctgtagaagatgggcagccagatatatcaaggccttttggatctcagccttggcatagctgtcacaaactcatatatgtcagaccaaatcctaaaactggggttcctataggtcattggcctgttccagagtctttttggccagatcaaaattcgccaacactaccacctcgtacatctcatcctgtagtgaagttttcctgtacagactgtgaaccaatggttattgataaacttccttttgacaaatatgagttggaaccttcaccactgactcaatttatcctggaaaggaaatctcctcaaacatgttggcaggtgtacgtgagcaatagtgcaaaatacagtgaacttggtcatccttttggttacttgaaagccagtacagcactgaactgtgtcaacttatttgtgatgccttacaattatccagtccttcttcccctcttagatgacttgtttaaagtgcataaagcaaaaccaacattgaagtggagacagtcatttgaaagttatttgaagacaatgcctccctactatcttgggcccttgaagaaagctgttaggatgatgggagcacctaacctaatagcagacagtatggaatatggacttagttacagtgtcatttcatacctcaaaaaactgagtcaacaggccaaaatagaatctgatcgagtcattggatctgtaggcaaaaaagtagtacaggagactggaataaaagtccggagccgatcacatggtttatcaatggcatataggaaagattttcaacaactcctccagggaatttcagaggatgtccctcacagactgctagaccttaatatgaaggaatacactgggttccaagttgctttgctgaataaggatttgaagccacagacatttagaaatgcttatgacataccaagacgaaatcttttggatcacttaacaagaatgagatctaatcttttgaagagcactcgcagatttctgaaaggacaggacgaagatcaagtgcacagtgttcctatagcacaaatggggaactaccaggaatacctcaagcaagtaccttctccactaagagaacttgatcctgatcagccacgaaggttgcatacatttggcaacccctttaagctggataagaagggtatgatgatagatgaagcagatgaatttgtggctggacctcaaaataaacataaacgacccggagaaccaaatatgcaagggatccctaaaagacgtcggtgtatgtctccactactaagaggcagacagcagaatcctgttgtaaacaatcatattgggggaaaaggaccacctgcacctacaactcaagcacagccagatcttattaaacctcttcctcttcataaaatttcagaaaccactaatgattcgataatacatgatgtggttgaaaatcatgttgcagaccaactttcatcagacattacaccaaatgctatggatacggaattttcagcatcttctccagccagtttactggaacggccaaccaatcatatggaggctcttggtcatgaccatttaggaaccaatgacctcactgttggtggatttttagaaaatcatgaggagccaagagataaagaacaatgtgctgaagagaacataccagcatcttcactcaacaaaggaaagaaattgatgcattgcagaagccatgaagaggtcaatactgaactaaaagcacaaataatgaaagagatccgaaagccaggaagaaaatatgaaagaatcttcactttactgaagcatgtgcaaggcagtttacaaacaagactaatatttttacaaaatgtcattaaagaagcatcaaggtttaaaaaacgaatgctaatagaacaactggagaacttcttggatgaaattcatcgaagagccaatcagatcaaccatattaatagcaattaaaagaaaatagaatgtggccacttatttcactatcttcttcaaatacaaagtaaatacaagactgttgtgatcttgcattcattttctgacatgcattgttggctatttgaaatactaaaagcaaatctacagatcctttttccatcattttacagtgaccttttcttcattttggtttatttttgtaatgtgaaaagtatcactctaaaaaacatttttaatttaacaaactaaaaatattcctccaaatctcttgcttgtcattgactcttgcgtgtcaatttccctcaggttctattttcttaaaccaacctttaaaattgtcacctctgttaaggttgaactttgccaaaaaaaaaagaagttactttgtaatttttggggaaaaaagcacatacattaaaactaggtaatgttttgtatatacagttattttggatatattattgtaagttgtacaaatgtattttgaagaatatttaagaaaagcacttttgttattccatcaataaatgctctattttactcttgtgtggtttaggaaataatcacatttaaagtaatcatttaaaaacatcctaagataatggaattttaaaggccttgctttttagcattggaaaaatacaccacttgaagttcatgtttgttaagcctaactgtaattacatgttacataatctgcattgcctttttactatatgttcgtagtttttgttggccatgccaacatactcccatttctgcctagattatgggaatgactttgtatggggcagatagacagatactttaaaagctatttaaaaagcaaacaactttggatattattggtttccttacttcaacaccttttcctttatcactaggattgtggatggcacgaagctgaagctgttagggagtggtaggtttggagtacagtacatgctctgaaatatctagcctttagcagcttcatgccatgcttgcaaaagcccacaacaaattggaggcctccttgttctgctctgctgttctcacacttaaactctgttttatttataagctaaatggaaaggaaacacctttaagatgactttgctcattttgcatcccccctgagtttcacaggataaggaaaaccacgctattcattctccaccctcaattcaacatggcctagagtatccgtactgaggaagcaatcttatggcctgactcactcaccattcatgatcactgctg

SEQ ID NO: 191 - protein, 883 aa, Homo sapiens; identical to SEQ ID NO: 189
